(19) United States
(12) Patent Application Publication
(10) Pub. No.: US 2023/0265428 A1
(43) Pub. Date: Aug. 24, 2023

(54) Modulators of APOL1 Expression

(71) Applicant: Ionis Pharmaceuticals, Inc., Carlsbad, CA (US)

(72) Inventor: Susan M. FREIER, San Diego, CA (US)

(21) Appl. No.: 18/053,447

(22) Filed: Nov. 8, 2022

Related U.S. Application Data
(63) Continuation of application No. 17/025,239, filed on Sep. 18, 2020, now Pat. No. 11,525,136.
Application No. 17/025,239 is a continuation of application No. 16/418,060, filed on May 21, 2019, now Pat. No. 10,927,377.
(60) Provisional application No. 62/674,865, filed on May 22, 2018.

(51) Int. Cl. C12N 15/113; A61P 13/02

(52) U.S. Cl. CPC C12N 15/113; A61P 13/02; C12N 2310/315; C12N 2310/3231; C12N 2310/321; C12N 2320/35; C12N 2310/341; C12N 2310/346; C12N 2310/11; C12N 2320/32; C12N 2310/3341

(57) ABSTRACT

The present embodiments provide methods, compounds, and compositions useful for inhibiting APOL1 expression, which may be useful for treating, preventing, or ameliorating a disease associated with APOL1.

### SEQUENCE LISTING

[0001] The present application is being filed along with a Sequence Listing in electronic format. The Sequence Listing is provided as a file entitled 200779-US-CNT2 Sequence Listing.xml created Nov. 4, 2022, which is 2.42 MB in size. The information in the electronic format of the sequence listing is incorporated herein by reference in its entirety.

### FIELD

[0002] The present embodiments provide methods, compounds, and compositions useful for inhibiting APOL1 (apolipoprotein L, 1) expression, and in certain instances, reducing the amount of APOL1 protein in a cell or animal, which can be useful for treating, preventing, or ameliorating a disease associated with APOL1.

### BACKGROUND

[0003] End-stage kidney disease (ESKD) affects over half a million individuals in the United States. In the US, the likelihood that individuals of African ancestry will develop ESKD is approximately twice that observed among other ethnic ancestry patients (McClellan W. et al. Am. J. Kidney Dis. 1988. 12: 285-290; Cowie C C. et al. N. Engl. J. Med. 1989. 321: 1074-1079). There are no specific therapies for the vast majority of kidney diseases. Anti-hypertensive and anti-inflamatory treatments have been found to slow progression and reduce symptoms in some patients for some types of chronic kidney disease (CKD), but they neither result in disease resolution nor completely halt disease progression.

[0004] Recent data has suggested the association of two common variants (G1 and G2) in the last exon of APOL1 among African ancestry patients and increased risk for developing CKD (Kao W H et al. Nat. Genet. 2008.40: 1185-1192; Lipkowitz M S et al. Kidney Int. 2013. 83: 114-120; Genovese G. et al. Science. 2010. 329: 841-845; Tzur et al. Hum Genet. 2010; Kopp et al. J Am Soc Nephrol. 2011). In a 2013 study, G1 and G2 risk variants in APOL1 were associated with higher rates of ESKD and progression of CKD that were observed in African ancestry patients as compared to other ethnic ancestry groups, regardless of diabetes status (Parsa A et al. N. Engl. J. Med. 2013. 369: 2183-2196). Approximately 50% of African ancestry subjects carry one risk allelle in APOL1 whilst approximately 13% of African ancestry subjects (— five million individuals) carry two risk alleles in APOL1, a substantial fraction of which will develop APOL1-associated CKD. Studies in African ancestry subjects with two APOL1 risk alleles have demonstrated increased odds ratios for developing many forms of renal disease including but not limited to focal segmental glomerularsclerosis (FSGS) (OR=10.5), hypertension attributed ESKD (OR=7.3), HIV associated nephropathy (HIVAN) (OR=29), sickle cell nephropathy (OR=3.4) and membranous lupus nephropathy (OR=5.4) (Genovese et al. Science, 2010; Tzur et al. Hum Genet. 2010; Kopp et al. J Am Soc Nephrol. 2011).

### SUMMARY

[0005] Certain embodiments provided herein are compounds and methods for reducing the amount or activity of APOL1 mRNA, and in certain embodiments, reducing the amount of APOL1 protein in a cell or animal. In certain embodiments, the animal has a APOL1-associated nephropathy, including for example HIV associated nephropathy, focal segmental gomerulosclerosis (FSGS), collapsing nephropathy, sickle cell nephropathy, arterionephro-sclerosis, lupus nephritis, hypertension associated nephropathy, and other forms of APOL1 associated proteinuric disease. In certain embodiments, the disease is focal segmental glomerulosclerosis (FSGS). In certain embodiments, the disease is CKD. In certain embodiments, the disease is aterionephro-sclerosis. In certain embodiments, the disease is lupus nephritis. In certain embodiments the disease is hypertension-attributed CKD. In certain embodiments, the disease is end stage renal disease (ESRD). In certain embodiments, the disease is HIV-associated nephropathy. In certain embodiments, the disease is sickle cell nephropathy. In certain embodiments, the disease is membranous lupus nephropathy.

[0006] Certain embodiments provided herein are directed to potent and tolerable compounds and compositions useful for inhibiting APOL1 expression, which can be useful for treating, preventing, ameliorating, or slowing progression of APOL1-associated nephropathy. Certain embodiments provided herein are directed to compounds and compositions that are more potent or have greater therapeutic value than compounds publicly disclosed.

### DETAILED DESCRIPTION

[0007] It is to be understood that both the foregoing general description and the following detailed description are exemplary and explanatory only and are not restrictive of the embodiments, as claimed. Herein, the use of the singular includes the plural unless specifically stated otherwise. As used herein, the use of “or” means “and/or” unless stated otherwise. Furthermore, the use of the term “including” as well as other forms, such as “includes” and “included”, is not limiting.

[0008] The section headings used herein are for organizational purposes only and are not to be construed as limiting the subject matter described. All documents, or portions of documents, cited in this application, including, but not limited to, patents, patent applications, articles, books, treatises, and GenBank and NCBI reference sequence records are hereby expressly incorporated by reference for the portions of the document discussed herein, as well as in their entirety.

[0009] It is understood that the sequence set forth in each SEQ ID NO in the examples contained herein is independent of any modification to a sugar moiety, an internucleoside linkage, or a nucleobase. As such, compounds defined by a SEQ ID NO may comprise, independently, one or more modifications to a sugar moiety, an internucleoside linkage, or a nucleobase. Compounds described by ION/ISIS number indicate a combination of nucleobase sequence, chemical modification, and motif.

### Definitions

[0010] Unless otherwise indicated, the following terms have the following meanings:

[0011] “2′-deoxynucleoside” means a nucleoside comprising 2′-H(H) furanosyl sugar moiety, as found in naturally occurring deoxyribonucleic acids (DNA). In certain embodiments, a 2′-deoxynucleoside may comprise a modified nucleobase or may comprise an RNA nucleobase (uracil).

[0012] “2′-O-methoxyethyl” (also 2′-MOE) refers to a 2′-O(CH₂)₂—OCH₃) in the place of the 2′-OH group of a ribosyl ring. A 2′-O-methoxyethyl modified sugar is a modified sugar.

[0013] “2′-MOE nucleoside” (also 2′-O-methoxyethyl nucleoside) means a nucleoside comprising a 2′-MOE modified sugar moiety.

[0014] “2′-substituted nucleoside” or “2-modified nucleoside” means a nucleoside comprising a 2′-substituted or 2′-modified sugar moiety. As used herein, “2′-substituted” or “2-modified” in reference to a sugar moiety means a sugar moiety comprising at least one 2′-substituent group other than H or OH.

[0015] “3′ target site” refers to the nucleotide of a target nucleic acid which is complementary to the 3′-most nucleotide of a particular compound.

[0016] “5′ target site” refers to the nucleotide of a target nucleic acid which is complementary to the 5′-most nucleotide of a particular compound.

[0017] “5-methylcytosine” means a cytosine with a methyl group attached to the 5 position.

[0018] “About” means within ±10% of a value. For example, if it is stated, “the compounds affected about 70% inhibition of APOL1”, it is implied that APOL1 levels are inhibited within a range of 60% and 80%.

[0019] “Administration” or “administering” refers to routes of introducing a compound or composition provided herein to an individual to perform its intended function. An example of a route of administration that can be used includes, but is not limited to parenteral administration, such as subcutaneous, intravenous, or intramuscular injection or infusion.

[0020] “Administered concomitantly” or “co-administration” means administration of two or more compounds in any manner in which the pharmacological effects of both are manifest in the patient. Concomitant administration does not require that both compounds be administered in a single pharmaceutical composition, in the same dosage form, by the same route of administration, or at the same time. The effects of both compounds need not manifest themselves at the same time. The effects need only be overlapping for a period of time and need not be coextensive. Concomitant administration or co-administration encompasses administration in parallel or sequentially.

[0021] “Amelioration” refers to an improvement or lessening of at least one indicator, sign, or symptom of an associated disease, disorder, or condition. In certain embodiments, amelioration includes a delay or slowing in the progression or severity of one or more indicators of a condition or disease. The progression or severity of indicators may be determined by subjective or objective measures, which are known to those skilled in the art.

[0022] “Animal” refers to a human or non-human animal, including, but not limited to, mice, rats, rabbits, dogs, cats, pigs, and non-human primates, including, but not limited to, monkeys and chimpanzees.

[0023] “Antisense activity” means any detectable and/or measurable activity attributable to the hybridization of an antisense compound to its target nucleic acid. In certain embodiments, antisense activity is a decrease in the amount or expression of a target nucleic acid or protein encoded by such target nucleic acid compared to target nucleic acid levels or target protein levels in the absence of the antisense compound to the target.

[0024] “Antisense compound” means a compound comprising an oligonucleotide and optionally one or more additional features, such as a conjugate group or terminal group. Examples of antisense compounds include single-stranded and double-stranded compounds, such as, oligonucleotides, ribozymes, siRNAs, shRNAs, ssRNAs, and occupancy-based compounds.

[0025] “Antisense inhibition” means reduction of target nucleic acid levels in the presence of an antisense compound complementary to a target nucleic acid compared to target nucleic acid levels in the absence of the antisense compound.

[0026] “Antisense mechanisms” are all those mechanisms involving hybridization of a compound with target nucleic acid, wherein the outcome or effect of the hybridization is either target degradation or target occupancy with concomitant stalling of the cellular machinery involving, for example, transcription or splicing.

[0027] “Antisense oligonucleotide” means an oligonucleotide having a nucleobase sequence that is complementary to a target nucleic acid or region or segment thereof. In certain embodiments, an antisense oligonucleotide is specifically hybridizable to a target nucleic acid or region or segment thereof.

[0028] “APOL1” means any nucleic acid or protein of APOL1. “APOL1 nucleic acid” means any nucleic acid encoding APOL1. For example, in certain embodiments, a APOL1 nucleic acid includes a DNA sequence encoding APOL1, an RNA sequence transcribed from DNA encoding APOL1 (including genomic DNA comprising introns and exons), and an mRNA sequence encoding APOL1. “APOL1 mRNA” means an mRNA encoding a APOL1 protein. The target may be referred to in either upper or lower case.

[0029] “APOL1 specific inhibitor” refers to any agent capable of specifically inhibiting APOL1 RNA and/or APOL1 protein expression or activity at the molecular level. For example, APOL1 specific inhibitors include nucleic acids (including antisense compounds), peptides, antibodies, small molecules, and other agents capable of inhibiting the expression of APOL1 RNA and/or APOL1 protein.

[0030] “Bicyclic nucleoside” or “BNA” means a nucleoside comprising a bicyclic sugar moiety. “Bicyclic sugar” or “bicyclic sugar moiety” means a modified sugar moiety comprising two rings, wherein the second ring is formed via a bridge connecting two of the atoms in the first ring thereby forming a bicyclic structure. In certain embodiments, the first ring of the bicyclic sugar moiety is a furanosyl moiety. In certain embodiments, the bicyclic sugar moiety does not comprise a furanosyl moiety.

[0031] “Branching group” means a group of atoms having at least 3 positions that are capable of forming covalent linkages to at least 3 groups. In certain embodiments, a branching group provides a plurality of reactive sites for connecting tethered ligands to an oligonucleotide via a conjugate linker and/or a cleavable moiety.

[0032] “Cell-targeting moiety” means a conjugate group or portion of a conjugate group that is capable of binding to a particular cell type or particular cell types.

[0033] “cEt” or “constrained ethyl” means a ribosyl bicyclic sugar moiety wherein the second ring of the bicyclic sugar is formed via a bridge connecting the 4′-carbon and the 2′-carbon, wherein the bridge has the formula: 4′-CH(CH₃)—O-2′, and wherein the methyl group of the bridge is in the S configuration.

[0034] “cEt nucleoside” means a nucleoside comprising a cEt modified sugar moiety.

[0035] “Chemical modification” in a compound describes the substitutions or changes through chemical reaction, of any of the units in the compound relative to the original state of such unit. “Modified nucleoside” means a nucleoside having, independently, a modified sugar moiety and/or modified nucleobase. “Modified oligonucleotide” means an oligonucleotide comprising at least one modified internucleoside linkage, a modified sugar, and/or a modified nucleobase.

[0036] “Chemically distinct region” refers to a region of a compound that is in some way chemically different than another region of the same compound. For example, a region having 2′-O-methoxyethyl nucleotides is chemically distinct from a region having nucleotides without 2′-O-methoxyethyl modifications.

[0037] “Chimeric antisense compounds” means antisense compounds that have at least 2 chemically distinct regions, each position having a plurality of subunits.

[0038] “Cleavable bond” means any chemical bond capable of being split. In certain embodiments, a cleavable bond is selected from among: an amide, a polyamide, an ester, an ether, one or both esters of a phosphodiester, a phosphate ester, a carbamate, a di-sulfide, or a peptide.

[0039] “Cleavable moiety” means a bond or group of atoms that is cleaved under physiological conditions, for example, inside a cell, an animal, or a human.

[0040] “Complementary” in reference to an oligonucleotide means the nucleobase sequence of such oligonucleotide or one or more regions thereof matches the nucleobase sequence of another oligonucleotide or nucleic acid or one or more regions thereof when the two nucleobase sequences are aligned in opposing directions. Nucleobase matches or complementary nucleobases, as described herein, are limited to the following pairs: adenine (A) and thymine (T), adenine (A) and uracil (U), cytosine (C) and guanine (G), and 5-methyl cytosine (mC) and guanine (G) unless otherwise specified. Complementary oligonucleotides and/or nucleic acids need not have nucleobase complementarity at each nucleoside and may include one or more nucleobase mismatches. By contrast, “fully complementary” or “100% complementary” in reference to oligonucleotides means that such oligonucleotides have nucleobase matches at each nucleoside without any nucleobase mismatches.

[0041] “Conjugate group” means a group of atoms that is attached to an oligonucleotide. Conjugate groups include a conjugate moiety and a conjugate linker that attaches the conjugate moiety to the oligonucleotide.

[0042] “Conjugate linker” means a group of atoms comprising at least one bond that connects a conjugate moiety to an oligonucleotide.

[0043] “Conjugate moiety” means a group of atoms that is attached to an oligonucleotide via a conjugate linker.

[0044] “Contiguous” in the context of an oligonucleotide refers to nucleosides, nucleobases, sugar moieties, or internucleoside linkages that are immediately adjacent to each other. For example, “contiguous nucleobases” means nucleobases that are immediately adjacent to each other in a sequence.

[0045] “Designing” or “Designed to” refer to the process of designing a compound that specifically hybridizes with a selected nucleic acid molecule.

[0046] “Diluent” means an ingredient in a composition that lacks pharmacological activity, but is pharmaceutically necessary or desirable. For example, the diluent in an injected composition can be a liquid, e.g. saline solution.

[0047] “Differently modified” means chemical modifications or chemical substituents that are different from one another, including absence of modifications. Thus, for example, a MOE nucleoside and an unmodified DNA nucleoside are “differently modified,” even though the DNA nucleoside is unmodified. Likewise, DNA and RNA are “differently modified,” even though both are naturally-occurring unmodified nucleosides. Nucleosides that are the same but for comprising different nucleobases are not differently modified. For example, a nucleoside comprising a 2′-OMe modified sugar and an unmodified adenine nucleobase and a nucleoside comprising a 2′-OMe modified sugar and an unmodified thymine nucleobase are not differently modified.

[0048] “Dose” means a specified quantity of a compound or pharmaceutical agent provided in a single administration, or in a specified time period. In certain embodiments, a dose may be administered in two or more boluses, tablets, or injections. For example, in certain embodiments, where subcutaneous administration is desired, the desired dose may require a volume not easily accommodated by a single injection. In such embodiments, two or more injections may be used to achieve the desired dose. In certain embodiments, a dose may be administered in two or more injections to minimize injection site reaction in an individual. In other embodiments, the compound or pharmaceutical agent is administered by infusion over an extended period of time or continuously. Doses may be stated as the amount of pharmaceutical agent per hour, day, week or month.

[0049] “Dosing regimen” is a combination of doses designed to achieve one or more desired effects.

[0050] “Double-stranded antisense compound” means an antisense compound comprising two oligomeric compounds that are complementary to each other and form a duplex, and wherein one of the two said oligomeric compounds comprises an oligonucleotide.

[0051] “Effective amount” means the amount of compound sufficient to effectuate a desired physiological outcome in an individual in need of the compound. The effective amount may vary among individuals depending on the health and physical condition of the individual to be treated, the taxonomic group of the individuals to be treated, the formulation of the composition, assessment of the individual's medical condition, and other relevant factors.

[0052] “Efficacy” means the ability to produce a desired effect.

[0053] “Expression” includes all the functions by which a gene's coded information is converted into structures present and operating in a cell. Such structures include, but are not limited to, the products of transcription and translation.

[0054] “Gapmer” means an oligonucleotide comprising an internal region having a plurality of nucleosides that support RNase H cleavage positioned between external regions having one or more nucleosides, wherein the nucleosides comprising the internal region are chemically distinct from the nucleoside or nucleosides comprising the external regions. The internal region may be referred to as the “gap” and the external regions may be referred to as the “wings.”

[0055] “Hybridization” means the annealing of oligonucleotides and/or nucleic acids. While not limited to a particular mechanism, the most common mechanism of hybridization involves hydrogen bonding, which may be Watson-Crick, Hoogsteen or reversed Hoogsteen hydrogen bonding, between complementary nucleobases. In certain embodiments, complementary nucleic acid molecules include, but are not limited to, an antisense compound and a nucleic acid target. In certain embodiments, complementary nucleic acid molecules include, but are not limited to, an oligonucleotide and a nucleic acid target.

[0056] “Immediately adjacent” means there are no intervening elements between the immediately adjacent elements of the same kind (e.g. no intervening nucleobases between the immediately adjacent nucleobases).

[0057] “Individual” means a human or non-human animal selected for treatment or therapy.

[0058] “Inhibiting the expression or activity” refers to a reduction or blockade of the expression or activity relative to the expression of activity in an untreated or control sample and does not necessarily indicate a total elimination of expression or activity.

[0059] “Internucleoside linkage” means a group or bond that forms a covalent linkage between adjacent nucleosides in an oligonucleotide. “Modified internucleoside linkage” means any internucleoside linkage other than a naturally occurring, phosphate internucleoside linkage. Non-phosphate linkages are referred to herein as modified internucleoside linkages.

[0060] “Lengthened oligonucleotides” are those that have one or more additional nucleosides relative to an oligonucleotide disclosed herein, e.g. a parent oligonucleotide.

[0061] “Linked nucleosides” means adjacent nucleosides linked together by an internucleoside linkage.

[0062] “Linker-nucleoside” means a nucleoside that links an oligonucleotide to a conjugate moiety. Linker-nucleosides are located within the conjugate linker of a compound. Linker-nucleosides are not considered part of the oligonucleotide portion of a compound even if they are contiguous with the oligonucleotide.

[0063] “Mismatch” or “non-complementary” means a nucleobase of a first oligonucleotide that is not complementary to the corresponding nucleobase of a second oligonucleotide or target nucleic acid when the first and second oligonucleotides are aligned. For example, nucleobases including but not limited to a universal nucleobase, inosine, and hypoxanthine, are capable of hybridizing with at least one nucleobase but are still mismatched or non-complementary with respect to nucleobase to which it hybridized. As another example, a nucleobase of a first oligonucleotide that is not capable of hybridizing to the corresponding nucleobase of a second oligonucleotide or target nucleic acid when the first and second oligonucleotides are aligned is a mismatch or non-complementary nucleobase.

[0064] “Modulating” refers to changing or adjusting a feature in a cell, tissue, organ or organism. For example, modulating APOL1 RNA can mean to increase or decrease the level of APOL1 RNA and/or APOL1 protein in a cell, tissue, organ or organism. A “modulator” effects the change in the cell, tissue, organ or organism. For example, a APOL1 compound can be a modulator that decreases the amount of APOL1 RNA and/or APOL1 protein in a cell, tissue, organ or organism.

[0065] “MOE” means methoxyethyl.

[0066] “Monomer” refers to a single unit of an oligomer. Monomers include, but are not limited to, nucleosides and nucleotides.

[0067] “Motif” means the pattern of unmodified and/or modified sugar moieties, nucleobases, and/or internucleoside linkages, in an oligonucleotide.

[0068] “Natural” or “naturally occurring” means found in nature.

[0069] “Non-bicyclic modified sugar” or “non-bicyclic modified sugar moiety” means a modified sugar moiety that comprises a modification, such as a substituent, that does not form a bridge between two atoms of the sugar to form a second ring.

[0070] “Nucleic acid” refers to molecules composed of monomeric nucleotides. A nucleic acid includes, but is not limited to, ribonucleic acids (RNA), deoxyribonucleic acids (DNA), single-stranded nucleic acids, and double-stranded nucleic acids.

[0071] “Nucleobase” means a heterocyclic moiety capable of pairing with a base of another nucleic acid. As used herein a “naturally occurring nucleobase” is adenine (A), thymine (T), cytosine (C), uracil (U), and guanine (G). A “modified nucleobase” is a naturally occurring nucleobase that is chemically modified. A “universal base” or “universal nucleobase” is a nucleobase other than a naturally occurring nucleobase and modified nucleobase, and is capable of pairing with any nucleobase.

[0072] “Nucleobase sequence” means the order of contiguous nucleobases in a nucleic acid or oligonucleotide independent of any sugar or internucleoside linkage.

[0073] “Nucleoside” means a compound comprising a nucleobase and a sugar moiety. The nucleobase and sugar moiety are each, independently, unmodified or modified. “Modified nucleoside” means a nucleoside comprising a modified nucleobase and/or a modified sugar moiety. Modified nucleosides include abasic nucleosides, which lack a nucleobase.

[0074] “Oligomeric compound” means a compound comprising a single oligonucleotide and optionally one or more additional features, such as a conjugate group or terminal group.

[0075] “Oligonucleotide” means a polymer of linked nucleosides each of which can be modified or unmodified, independent one from another. Unless otherwise indicated, oligonucleotides consist of 8-80 linked nucleosides. “Modified oligonucleotide” means an oligonucleotide, wherein at least one sugar, nucleobase, or internucleoside linkage is modified. “Unmodified oligonucleotide” means an oligonucleotide that does not comprise any sugar, nucleobase, or internucleoside modification.

[0076] “Parent oligonucleotide” means an oligonucleotide whose sequence is used as the basis of design for more oligonucleotides of similar sequence but with different lengths, motifs, and/or chemistries. The newly designed oligonucleotides may have the same or overlapping sequence as the parent oligonucleotide.

[0077] “Parenteral administration” means administration through injection or infusion. Parenteral administration includes subcutaneous administration, intravenous administration, intramuscular administration, intraarterial administration, intraperitoneal administration, or intracranial administration, e.g. intrathecal or intracerebroventricular administration.

[0078] “Pharmaceutically acceptable carrier or diluent” means any substance suitable for use in administering to an individual. For example, a pharmaceutically acceptable carrier can be a sterile aqueous solution, such as PBS or water-for-injection.

[0079] “Pharmaceutically acceptable salts” means physiologically and pharmaceutically acceptable salts of compounds, such as oligomeric compounds or oligonucleotides, i.e., salts that retain the desired biological activity of the parent compound and do not impart undesired toxicological effects thereto.

[0080] “Pharmaceutical agent” means a compound that provides a therapeutic benefit when administered to an individual.

[0081] “Pharmaceutical composition” means a mixture of substances suitable for administering to an individual. For example, a pharmaceutical composition may comprise one or more compounds or salt thereof and a sterile aqueous solution.

[0082] “Phosphorothioate linkage” means a modified phosphate linkage in which one of the non-bridging oxygen atoms is replaced with a sulfur atom. A phosphorothioate internucleoside linkage is a modified internucleoside linkage.

[0083] “Phosphorus moiety” means a group of atoms comprising a phosphorus atom. In certain embodiments, a phosphorus moiety comprises a mono-, di-, or tri-phosphate, or phosphorothioate.

[0084] “Portion” means a defined number of contiguous (i.e., linked) nucleobases of a nucleic acid. In certain embodiments, a portion is a defined number of contiguous nucleobases of a target nucleic acid. In certain embodiments, a portion is a defined number of contiguous nucleobases of an oligomeric compound.

[0085] “Prevent” refers to delaying or forestalling the onset, development or progression of a disease, disorder, or condition for a period of time from minutes to indefinitely.

[0086] “Prodrug” means a compound in a form outside the body which, when administered to an individual, is metabolized to another form within the body or cells thereof. In certain embodiments, the metabolized form is the active, or more active, form of the compound (e.g., drug). Typically conversion of a prodrug within the body is facilitated by the action of an enzyme(s) (e.g., endogenous or viral enzyme) or chemical(s) present in cells or tissues, and/or by physiologic conditions.

[0087] “Reduce” means to bring down to a smaller extent, size, amount, or number.

[0088] “RefSeq No.” is a unique combination of letters and numbers assigned to a sequence to indicate the sequence is for a particular target transcript (e.g., target gene). Such sequence and information about the target gene (collectively, the gene record) can be found in a genetic sequence database. Genetic sequence databases include the NCBI Reference Sequence database, GenBank, the European Nucleotide Archive, and the DNA Data Bank of Japan (the latter three forming the International Nucleotide Sequence Database Collaboration or INSDC).

[0089] “Region” is defined as a portion of the target nucleic acid having at least one identifiable structure, function, or characteristic.

[0090] “RNAi compound” means an antisense compound that acts, at least in part, through RISC or Ago2, but not through RNase H, to modulate a target nucleic acid and/or protein encoded by a target nucleic acid. RNAi compounds include, but are not limited to double-stranded siRNA, single-stranded RNA (ssRNA), and microRNA, including microRNA mimics.

[0091] “Segments” are defined as smaller or sub-portions of regions within a nucleic acid.

[0092] “Side effects” means physiological disease and/or conditions attributable to a treatment other than the desired effects. In certain embodiments, side effects include injection site reactions, liver function test abnormalities, renal function abnormalities, liver toxicity, renal toxicity, central nervous system abnormalities, myopathies, and malaise. For example, increased aminotransferase levels in serum may indicate liver toxicity or liver function abnormality. For example, increased bilirubin may indicate liver toxicity or liver function abnormality.

[0093] “Single-stranded” in reference to a compound means the compound has only one oligonucleotide. “Self-complementary” means an oligonucleotide that at least partially hybridizes to itself. A compound consisting of one oligonucleotide, wherein the oligonucleotide of the compound is self-complementary, is a single-stranded compound. A single-stranded compound may be capable of binding to a complementary compound to form a duplex.

[0094] “Sites” are defined as unique nucleobase positions within a target nucleic acid.

[0095] “Specifically hybridizable” refers to an oligonucleotide having a sufficient degree of complementarity between the oligonucleotide and a target nucleic acid to induce a desired effect, while exhibiting minimal or no effects on non-target nucleic acids. In certain embodiments, specific hybridization occurs under physiological conditions.

[0096] “Specifically inhibit” with reference to a target nucleic acid means to reduce or block expression of the target nucleic acid while exhibiting fewer, minimal, or no effects on non-target nucleic acids. Reduction does not necessarily indicate a total elimination of the target nucleic acid's expression.

[0097] “Standard cell assay” means assay(s) described in the Examples and reasonable variations thereof

[0098] “Standard in vivo experiment” means the procedure(s) described in the Example(s) and reasonable variations thereof.

[0099] “Stereorandom chiral center” in the context of a population of molecules of identical molecular formula means a chiral center having a random stereochemical configuration. For example, in a population of molecules comprising a stereorandom chiral center, the number of molecules having the (S) configuration of the stereorandom chiral center may be but is not necessarily the same as the number of molecules having the (R) configuration of the stereorandom chiral center. The stereochemical configuration of a chiral center is considered random when it is the result of a synthetic method that is not designed to control the stereochemical configuration. In certain embodiments, a stereorandom chiral center is a stereorandom phosphorothioate internucleoside linkage.

[0100] “Sugar moiety” means an unmodified sugar moiety or a modified sugar moiety. “Unmodified sugar moiety” or “unmodified sugar” means a 2′-OH(H) ribosyl moiety, as found in RNA (an “unmodified RNA sugar moiety”), or a 2′-H(H) moiety, as found in DNA (an “unmodified DNA sugar moiety”). “Modified sugar moiety” or “modified sugar” means a modified furanosyl sugar moiety or a sugar surrogate. “Modified furanosyl sugar moiety” means a furanosyl sugar comprising a non-hydrogen substituent in place of at least one hydrogen or hydroxyl of an unmodified sugar moiety. In certain embodiments, a modified furanosyl sugar moiety is a 2′-substituted sugar moiety. Such modified furanosyl sugar moieties include bicyclic sugars and non-bicyclic sugars.

[0101] “Sugar surrogate” means a modified sugar moiety having other than a furanosyl moiety that can link a nucleobase to another group, such as an internucleoside linkage, conjugate group, or terminal group in an oligonucleotide. Modified nucleosides comprising sugar surrogates can be incorporated into one or more positions within an oligonucleotide and such oligonucleotides are capable of hybridizing to complementary compounds or nucleic acids.

[0102] “Synergy” or “synergize” refers to an effect of a combination that is greater than additive of the effects of each component alone at the same doses.

[0103] “Target gene” refers to a gene encoding a target.

[0104] “Targeting” means the specific hybridization of a compound to a target nucleic acid in order to induce a desired effect.

[0105] “Target nucleic acid,” “target RNA,” “target RNA transcript” and “nucleic acid target” all mean a nucleic acid capable of being targeted by compounds described herein.

[0106] “Target region” means a portion of a target nucleic acid to which one or more compounds is targeted.

[0107] “Target segment” means the sequence of nucleotides of a target nucleic acid to which a compound is targeted. “5′ target site” refers to the 5′-most nucleotide of a target segment. “3′ target site” refers to the 3′-most nucleotide of a target segment.

[0108] “Terminal group” means a chemical group or group of atoms that is covalently linked to a terminus of an oligonucleotide.

[0109] “Therapeutically effective amount” means an amount of a compound, pharmaceutical agent, or composition that provides a therapeutic benefit to an individual.

[0110] “Treat” refers to administering a compound or pharmaceutical composition to an animal in order to effect an alteration or improvement of a disease, disorder, or condition in the animal.

### Certain Embodiments

[0111] Certain embodiments provide methods, compounds and compositions for inhibiting APOL1 (APOL1) expression.

[0112] Certain embodiments provide compounds targeted to a APOL1 nucleic acid. In certain embodiments, the APOL1 nucleic acid has the sequence set forth in RefSeq or GENBANK Accession No. NM 003661.3 (incorporated by reference, disclosed herein as SEQ ID NO: 1), NT 011520.9 truncated from nucleotides 15986452 to 16001905 (SEQ ID NO: 2), NM_001136541.1 (SEQ ID NO: 3), NM 001136540.1 (SEQ ID NO: 4), NM 145343.2 (SEQ ID NO: 5), DC339680.1 (SEQ ID NO: 6), AK309143.1 (SEQ ID NO: 7), NT_011520.13 truncated from nucleotides 17543446 to 17543655 (SEQ ID NO: 8), or NC_000022.11 truncated from nucleotides 36250001 to 36271000 (SEQ ID NO: 9). In certain embodiments, the compound is an antisense compound or oligomeric compound. In certain embodiments, the compound is single-stranded. In certain embodiments, the compound is double-stranded.

[0113] Certain embodiments provide a compound comprising a modified oligonucleotide 8 to 80 linked nucleosides in length and having a nucleobase sequence comprising at least 8 contiguous nucleobases of any of the nucleobase sequences of SEQ ID NOs: 13-1941. In certain embodiments, the compound is an antisense compound or oligomeric compound. In certain embodiments, the compound is single-stranded. In certain embodiments, the compound is double-stranded. In certain embodiments, the modified oligonucleotide is 10 to 30 linked nucleosides in length.

[0114] Certain embodiments provide a compound comprising a modified oligonucleotide 12 to 80 linked nucleosides in length and having a nucleobase sequence comprising at least 12 contiguous nucleobases of any of the nucleobase sequences of SEQ ID NOs: 13-1941. In certain embodiments, the compound is an antisense compound or oligomeric compound. In certain embodiments, the compound is single-stranded. In certain embodiments, the compound is double-stranded. In certain embodiments, the modified oligonucleotide is 12 to 30 linked nucleosides in length.

[0115] In certain embodiments, the compound comprises a modified oligonucleotide 16 linked nucleosides in length. In certain embodiments, the compound is an antisense compound or oligomeric compound.

[0116] Certain embodiments provide a compound comprising a modified oligonucleotide 16 to 30 linked nucleosides in length and having a nucleobase sequence comprising the nucleobase sequence of any one of SEQ ID NOs: 13-1941. In certain embodiments, the compound is an antisense compound or oligomeric compound. In certain embodiments, the compound is single-stranded. In certain embodiments, the compound is double-stranded.

[0117] Certain embodiments provide a compound comprising a modified oligonucleotide consisting of the nucleobase sequence of any one of SEQ ID NOs: 13-1941. In certain embodiments, the compound is an antisense compound or oligomeric compound. In certain embodiments, the compound is single-stranded. In certain embodiments, the compound is double-stranded.

[0118] In certain embodiments, compounds target nucleotides 5849-5907, 5853-5869, 5855-5873, 8145-8180, 8168-8216, 8306-8321, 8320-8338, 8723-8847, 8743-8760, 8829-8847, 8755-8840, 14342-14390, and 14342-14370 of a APOL1 nucleic acid. In certain embodiments, compounds target within nucleotides 5849-5907, 5853-5869, 5855-5873, 8145-8180, 8168-8216, 8306-8321, 8320-8338, 8723-8847, 8743-8760, 8829-8847, 8755-8840, 14342-14390, and 14342-14370 of a APOL1 nucleic acid having the nucleobase sequence of SEQ ID NO: 2. In certain embodiments, compounds have at least an 8, 9, 10, 11, 12, 13, 14, 15, or 16 contiguous nucleobase portion complementary to an equal length portion within nucleotides 5849-5907, 5853-5869, 5855-5873, 8145-8180, 8168-8216, 8306-8321, 8320-8338, 8723-8847, 8743-8760, 8829-8847, 8755-8840, 14342-14390, and 14342-14370 of a APOL1 nucleic acid having the nucleobase sequence of SEQ ID NO: 2. In certain embodiments, these compounds are antisense compounds, oligomeric compounds, or oligonucleotides.

[0119] In certain embodiments, compounds target a region of a APOL1 nucleic acid having the nucleobase sequence of SEQ ID NO: 2 within nucleobases 5849-5907, 5853-5869, 5855-5873, 8145-8180, 8168-8216, 8306-8321, 8320-8338, 8723-8847, 8743-8760, 8829-8847, 8755-8840, 14342-14390, and 14342-14370. In certain embodiments, compounds target at least an 8, 9, 10, 11, 12, 13, 14, 15, or 16 contiguous nucleobases within the aforementioned nucleobase regions. In certain embodiments, these compounds are antisense compounds, oligomeric compounds, or oligonucleotides. In certain embodiments, the modified oligonucleotide is 10 to 30 linked nucleosides in length.

[0120] In certain embodiments, a compound comprises a modified oligonucleotide 12 to 30 linked nucleosides in length and complementary within nucleotides 5854-5869, 5855-5870, 8164-8179, 8306-8321, 8321-8336, 8744-8759, 8829-8844, or 14342-14357 of SEQ ID NO: 2. In certain embodiments, the modified oligonucleotide is 16 to 30 linked nucleosides in length.

[0121] In certain embodiments, a compound comprises a modified oligonucleotide 12 to 30 linked nucleosides in length and having a nucleobase sequence comprising at least an 8, 9, 10, 11, 12, 13, 14, 15, or 16 contiguous nucleobase portion any one of SEQ ID NOs: 1164, 13, 76, 81, 1095, 1326, 1730, and 1925. In certain embodiments, the modified oligonucleotide is 16 to 30 linked nucleosides in length.

[0122] In certain embodiments, a compound comprises a modified oligonucleotide 12 to 30 linked nucleosides in length and having a nucleobase sequence comprising any one of SEQ ID NOs: 1164, 13, 76, 81, 1095, 1326, 1730, and 1925. In certain embodiments, the modified oligonucleotide is 16 to 30 linked nucleosides in length.

[0123] In certain embodiments, a compound comprises a modified oligonucleotide having a nucleobase sequence consisting of any one of SEQ ID NOs: 1164, 13, 76, 81, 1095, 1326, 1730, and 1925.

[0124] In certain embodiments, any of the foregoing modified oligonucleotides comprises at least one modified internucleoside linkage, at least one modified sugar, and/or at least one modified nucleobase.

[0125] In certain embodiments, any of the foregoing modified oligonucleotides comprises at least one modified sugar. In certain embodiments, at least one modified sugar comprises a 2′-O-methoxyethyl group. In certain embodiments, at least one modified sugar is a bicyclic sugar, such as a 4′-CH(CH₃)—O-2′ group, a 4′-CH₂—O-2′ group, or a 4′-(CH₂)2-O-2′ group.

[0126] In certain embodiments, the modified oligonucleotide comprises at least one modified internucleoside linkage, such as a phosphorothioate internucleoside linkage.

[0127] In certain embodiments, any of the foregoing modified oligonucleotides comprises at least one modified nucleobase, such as 5-methylcytosine.

[0128] In certain embodiments, any of the foregoing modified oligonucleotides comprises:
[0129] a gap segment consisting of linked deoxynucleosides;
[0130] a 5′ wing segment consisting of linked nucleosides; and
[0131] a 3′ wing segment consisting of linked nucleosides;

[0132] wherein the gap segment is positioned between the 5′ wing segment and the 3′ wing segment and wherein each nucleoside of each wing segment comprises a modified sugar. In certain embodiments, the modified oligonucleotide is 16 to 80 linked nucleosides in length having a nucleobase sequence comprising the sequence recited in any one of SEQ ID NOs: 1164, 13, 76, 81, 1095, 1326, 1730, and 1925. In certain embodiments, the modified oligonucleotide is 16 to 30 linked nucleosides in length having a nucleobase sequence comprising the sequence recited in any one of SEQ ID NOs: 1164, 13, 76, 81, 1095, 1326, 1730, and 1925. In certain embodiments, the modified oligonucleotide is 16 linked nucleosides in length having a nucleobase sequence consisting of the sequence recited in any one of SEQ ID NOs: 1164, 13, 76, 81, 1095, 1326, 1730, and 1925.

[0133] In certain embodiments, a compound comprises or consists of a modified oligonucleotide 16-30 linked nucleobases in length having a nucleobase sequence comprising the sequence recited in any one of SEQ ID NOs: 13, 1095, 1730, 76, 1326, and 81, wherein the modified oligonucleotide comprises
[0134] a gap segment consisting of ten linked deoxynucleosides;
[0135] a 5′ wing segment consisting of three linked nucleosides; and
[0136] a 3′ wing segment consisting of three linked nucleosides;

[0137] wherein the gap segment is positioned between the 5′ wing segment and the 3′ wing segment, wherein the 5′ and 3′ wing segments comprise a cEt nucleoside; wherein each internucleoside linkage is a phosphorothioate linkage; and wherein each cytosine is a 5-methylcytosine. In certain embodiments, the modified oligonucleotide is 16-80 linked nucleosides in length. In certain embodiments, the modified oligonucleotide is 16-30 linked nucleosides in length.

[0138] In certain embodiments, a compound comprises or consists of a modified oligonucleotide 16-30 linked nucleobases in length having a nucleobase sequence comprising or consisting of the sequence recited in any one of SEQ ID NOs: 1164 and 1925, wherein the modified oligonucleotide comprises:
[0139] a gap segment consisting of nine linked deoxynucleosides;
[0140] a 5′ wing segment consisting of three linked nucleoside; and
[0141] a 3′ wing segment consisting of four linked nucleosides;

[0142] wherein the gap segment is positioned between the 5′ wing segment and the 3′ wing segment; wherein the 5′ wing segment comprises cEt nucleosides; wherein the 3′ wing segment comprises a cEt nucleoside, a a cEt nucleoside, a cEt nucleoside, and 2′-O-methoxyethyl nucleoside in the 5′ to 3′ direction;

[0143] wherein each internucleoside linkage is a phosphorothioate linkage; and wherein each cytosine is a 5-methylcytosine. In certain embodiments, the modified oligonucleotide is 16-30 linked nucleosides in length. In certain embodiments, the modified oligonucleotide is 16 linked nucleosides in length.

[0144] In certain embodiments, a compound comprises or consists of a modified oligonucleotide 16-30 linked nucleobases in length having a nucleobase sequence comprising or consisting of the sequence recited in SEQ ID NO: 1164, wherein the modified oligonucleotide comprises:
[0145] a gap segment consisting of nine linked deoxynucleosides;
[0146] a 5′ wing segment consisting of three linked nucleoside; and
[0147] a 3′ wing segment consisting of four linked nucleosides;

[0148] wherein the gap segment is positioned between the 5′ wing segment and the 3′ wing segment; wherein the 5′ wing segment comprises cEt nucleosides; wherein the 3′ wing segment comprises a cEt nucleoside, a a cEt nucleoside, a cEt nucleoside, and 2′-O-methoxyethyl nucleoside in the 5′ to 3′ direction; wherein each internucleoside linkage is a phosphorothioate linkage; and wherein each cytosine is a 5-methylcytosine. In certain embodiments, the modified oligonucleotide is 16-30 linked nucleosides in length. In certain embodiments, the modified oligonucleotide is 16 linked nucleosides in length.

[0149] In certain embodiments, a compound comprises or consists of the following formula Tks Tks Tks Tds Gds Tds Ads Ads Gds Tds Gds mCds Aks Aks mCks mCe, wherein,
[0150] A=an adenine,
[0151] mC=a 5-methylcytosine
[0152] G=a guanine,
[0153] T=a thymine,
[0154] e=a 2′-O-methoxyethyl modified nucleoside,
[0155] k=a cEt modified nucleoside,
[0156] d=a 2′-deoxynucleoside, and
[0157] s=a phosphorothioate internucleoside linkage.

[0158] In certain embodiments, a compound comprises or consists of ION 972190 or salt thereof, having the following chemical structure:

[chemical structure]

[0159] In certain embodiments, a compound comprises or consists of the sodium salt of ION 972190, having the following chemical structure:

[chemical structure]

[0160] In any of the foregoing embodiments, the compound or oligonucleotide can be at least 85%, at least 90%, at least 95%, at least 98%, at least 99%, or 100% complementary to a nucleic acid encoding APOL1.

[0161] In any of the foregoing embodiments, the compound can be single-stranded. In certain embodiments, the compound comprises deoxyribonucleotides. In certain embodiments, the compound is double-stranded. In certain embodiments, the compound is double-stranded and comprises ribonucleotides. In any of the foregoing embodiments, the compound can be an antisense compound or oligomeric compound.

[0162] In any of the foregoing embodiments, the compound can be 8 to 80, 10 to 30, 12 to 50, 13 to 30, 13 to 50, 14 to 30, 14 to 50, 15 to 30, 15 to 50, 16 to 30, 16 to 50, 17 to 30, 17 to 50, 18 to 22, 18 to 24, 18 to 30, 18 to 50, 19 to 22, 19 to 30, 19 to 50, or 20 to 30 linked nucleosides in length. In certain embodiments, the compound comprises or consists of an oligonucleotide.

[0163] In certain embodiments, compounds or compositions provided herein comprise a pharmaceutically acceptable salt of the modified oligonucleotide. In certain embodiments, the salt is a sodium salt. In certain embodiments, the salt is a potassium salt.

[0164] In certain embodiments, the compounds or compositions as described herein are highly tolerable as demonstrated by having at least one of an increase an alanine transaminase (ALT) or aspartate transaminase (AST) value of no more than 4 fold, 3 fold, or 2 fold over saline treated animals or an increase in liver, spleen, or kidney weight of no more than 30%, 20%, 15%, 12%, 10%, 5%, or 2% compared to control treated animals. In certain embodiments, the compounds or compositions as described herein are highly tolerable as demonstrated by having no increase of ALT or AST over control treated animals. In certain embodiments, the compounds or compositions as described herein are highly tolerable as demonstrated by having no increase in liver, spleen, or kidney weight over control animals.

[0165] Certain embodiments provide a composition comprising the compound of any of the aforementioned embodiments or any pharmaceutically acceptable salt thereof and at least one of a pharmaceutically acceptable carrier or diluent. In certain embodiments, the composition has a viscosity less than about 40 centipoise (cP), less than about 30 centipose (cP), less than about 20 centipose (cP), less than about 15 centipose (cP), or less than about 10 centipose (cP). In certain embodiments, the composition having any of the aforementioned viscosities comprises a compound provided herein at a concentration of about 100 mg/mL, about 125 mg/mL, about 150 mg/mL, about 175 mg/mL, about 200 mg/mL, about 225 mg/mL, about 250 mg/mL, about 275 mg/mL, or about 300 mg/mL. In certain embodiments, the composition having any of the aforementioned viscosities and/or compound concentrations has a temperature of room temperature or about 20° C., about 21° C., about 22° C., about 23° C., about 24° C., about 25° C., about 26° C., about 27° C., about 28° C., about 29° C., or about 30° C.

### Certain Indications

[0166] Certain embodiments provided herein relate to methods of inhibiting APOL1 expression, which can be useful for treating, preventing, or ameliorating a disease associated with APOL1 in an individual, by administration of a compound that targets APOL1. In certain embodiments, the compound can be a APOL1 specific inhibitor. In certain embodiments, the compound can be an antisense compound, oligomeric compound, or oligonucleotide targeted to APOL1.

[0167] Examples of diseases associated with APOL1 treatable, preventable, and/or ameliorable with the methods provided herein include APOL-1-associated nephropathy, focal segmental glomerulosclerosis (FSGS), collapsing nephropathy, CKD, hypertension attributed nephropathy, HIV-associated nephropathy, sickle cell nephropathy, ESKD, glomerular damage, ESRD, arterionephro-sclerosis, lupus nephritis, and other forms of APOL1 associated proteinuric disease.

[0168] In certain embodiments, a method of treating, preventing, or ameliorating a disease associated with APOL1 in an individual comprises administering to the individual a compound comprising a APOL1 specific inhibitor, thereby treating, preventing, or ameliorating the disease. In certain embodiments, the individual is identified as having or at risk of having a disease associated with APOL1. In certain embodiments, the disease is a APOL1-associated nephropathy. In certain embodiments, the APOL1-associated nephropathy is one of focal segmental glomerulosclerosis (FSGS), collapsing nephropathy, CKD, hypertension attributed nephropathy, HIV-associated nephropathy, sickle cell nephropathy, arterionephro-sclerosis, lupus nephritis, and other forms of APOL1-associated proteinuric disease. In certain embodiments, the compound comprises an antisense compound targeted to APOL1. In certain embodiments, the compound comprises an oligonucleotide targeted to APOL1. In certain embodiments, a compound comprises a modified oligonucleotide 16 to 30 linked nucleosides in length and having a nucleobase sequence comprising at least 8 contiguous nucleobases of any of the nucleobase sequences of SEQ ID NOs: 13-1941. In certain embodiments, a compound comprises a modified oligonucleotide 16 to 30 linked nucleosides in length and having a nucleobase sequence comprising the nucleobase sequence of any one of SEQ ID NOs: 13-1941. In certain embodiments, a compound comprises a modified oligonucleotide consisting of the nucleobase sequence of any one of SEQ ID NOs: 13-1941. In certain embodiments, a compound comprises a modified oligonucleotide 16 to 30 linked nucleosides in length having a nucleobase sequence comprising any one of SEQ ID NOs: 1164, 13, 76, 81, 1095, 1326, 1730, and 1925. In certain embodiments, a compound comprises a modified oligonucleotide having a nucleobase sequence consisting of any one of SEQ ID NOs: 1164, 13, 76, 81, 1095, 1326, 1730, and 1925. In certain embodiments, the compound is ION #793406, 904763, 905469, 905505, 905634, 905665, 972190, and 972163. In any of the foregoing embodiments, the compound can be single-stranded or double-stranded. In any of the foregoing embodiments, the compound can be an antisense compound or oligomeric compound. In certain embodiments, the compound is administered to the individual parenterally. In certain embodiments, administering the compound improves, preserves, or prevents edema, proteinuria, albuminuria, GFR decline, high lipid levels, high cholesterol levels, nephrotic syndrome, high blood pressure or hypertension, kidney damage, glomerular damage, and kidney failure.

[0169] In certain embodiments, a method of treating, preventing, or ameliorating edema, proteinuria, albuminuria, GFR decline, high lipid levels, high cholesterol levels, nephrotic syndrome, high blood pressure or hypertension, kidney damage, glomerular damage, and kidney failure comprises administering to the individual a compound comprising a APOL1 specific inhibitor, thereby treating, preventing, or ameliorating edema, proteinuria, albuminuria, GFR decline, high lipid levels, high cholesterol levels, nephrotic syndrome, high blood pressure or hypertension, kidney damage, glomerular damage, and kidney failure. In certain embodiments, the compound comprises an antisense compound targeted to APOL1. In certain embodiments, the compound comprises an oligonucleotide targeted to APOL1. In certain embodiments, a compound comprises a modified oligonucleotide 16 to 30 linked nucleosides in length and having a nucleobase sequence comprising at least 8 contiguous nucleobases of any of the nucleobase sequences of SEQ ID NOs: 13-1941. In certain embodiments, a compound comprises a modified oligonucleotide 16 to 30 linked nucleosides in length and having a nucleobase sequence comprising the nucleobase sequence of any one of SEQ ID NOs: 13-1941. In certain embodiments, a compound comprises a modified oligonucleotide consisting of the nucleobase sequence of any one of SEQ ID NOs: 13-1941. In certain embodiments, a compound comprises a modified oligonucleotide 16 to 30 linked nucleosides in length having a nucleobase sequence comprising any one of SEQ ID NOs: 1164, 13, 76, 81, 1095, 1326, 1730, and 1925. In certain embodiments, a compound comprises a modified oligonucleotide having a nucleobase sequence consisting of any one of SEQ ID NOs: 1164, 13, 76, 81, 1095, 1326, 1730, and 1925. In certain embodiments, the compound is ION #793406, 904763, 905469, 905505, 905634, 905665, 972190, and 972163. In any of the foregoing embodiments, the compound can be single-stranded or double-stranded. In any of the foregoing embodiments, the compound can be an antisense compound or oligomeric compound. In certain embodiments, the compound is administered to the individual parenterally. In certain embodiments, administering the compound improves, preserves, or prevents edema, proteinuria, albuminuria, GFR decline, high lipid levels, high cholesterol levels, nephrotic syndrome, high blood pressure or hypertension, kidney damage, glomerular damage, and kidney failure. In certain embodiments, the individual is identified as having or at risk of having a disease associated with APOL1.

[0170] In certain embodiments, a method of inhibiting expression of APOL1 in an individual having, or at risk of having, a disease associated with APOL1 comprises administering to the individual a compound comprising a APOL1 specific inhibitor, thereby inhibiting expression of APOL1 in the individual. In certain embodiments, administering the compound inhibits expression of APOL1 in the kidney. In certain embodiments, the disease is a APOL1-associated nephropathy. In certain embodiments, the APOL1-associated nephropathy is one of focal segmental glomerulosclerosis (FSGS), collapsing nephropathy, CKD, hypertension attributed nephropathy, HIV-associated nephropathy, sickle cell nephropathy, arterionephro-sclerosis, lupus nephritis, ESKD, and other forms of APOL1-associated proteinuric disease. In certain embodiments, the individual has, or is at risk of having edema, proteinuria, albuminuria, GFR decline, high lipid levels, high cholesterol levels, nephrotic syndrome, high blood pressure or hypertension, kidney damage, glomerular damage, or kidney failure, or a combination of these symptoms. In certain embodiments, the compound comprises an antisense compound targeted to APOL1. In certain embodiments, the compound comprises an oligonucleotide targeted to APOL1. In certain embodiments, the compound comprises an oligonucleotide targeted to APOL1. In certain embodiments, a compound comprises a modified oligonucleotide 16 to 30 linked nucleosides in length and having a nucleobase sequence comprising at least 8 contiguous nucleobases of any of the nucleobase sequences of SEQ ID NOs: 13-1941. In certain embodiments, a compound comprises a modified oligonucleotide 16 to 30 linked nucleosides in length and having a nucleobase sequence comprising the nucleobase sequence of any one of SEQ ID NOs: 13-1941. In certain embodiments, a compound comprises a modified oligonucleotide consisting of the nucleobase sequence of any one of SEQ ID NOs: 13-1941. In certain embodiments, a compound comprises a modified oligonucleotide 16 to 30 linked nucleosides in length having a nucleobase sequence comprising any one of SEQ ID NOs: 1164, 13, 76, 81, 1095, 1326, 1730, and 1925. In certain embodiments, a compound comprises a modified oligonucleotide having a nucleobase sequence consisting of any one of SEQ ID NOs: 1164, 13, 76, 81, 1095, 1326, 1730, and 1925. In certain embodiments, the compound is ION #793406, 904763, 905469, 905505, 905634, 905665, 972190, and 972163. In any of the foregoing embodiments, the compound can be single-stranded or double-stranded. In any of the foregoing embodiments, the compound can be an antisense compound or oligomeric compound. In certain embodiments, the compound is administered to the individual parenterally. In certain embodiments, administering the compound improves, preserves, or prevents edema, proteinuria, albuminuria, GFR decline, high lipid levels, high cholesterol levels, nephrotic syndrome, high blood pressure or hypertension, kidney damage, glomerular damage, and kidney failure.

[0171] In certain embodiments, a method of inhibiting expression of APOL1 in a cell comprises contacting the cell with a compound comprising a APOL1 specific inhibitor, thereby inhibiting expression of APOL1 in the cell. In certain embodiments, the cell is a glomerulus. In certain embodiments, the cell is in the kidney. In certain embodiments, the cell is in the kidney of an individual who has, or is at risk of having an APOL1-associated nephropathy. In certain embodiments, the APOL1-associated nephropathy is one of focal segmental glomerulosclerosis (FSGS), collapsing nephropathy, CKD, hypertension attributed nephropathy, HIV-associated nephropathy, sickle cell nephropathy, arterionephro-sclerosis, lupus nephritis, ESKD, and other forms of APOL1-associated proteinuric disease. In certain embodiments, the compound comprises an antisense compound targeted to APOL1. In certain embodiments, the compound comprises an oligonucleotide targeted to APOL1. In certain embodiments, a compound comprises a modified oligonucleotide 16 to 30 linked nucleosides in length and having a nucleobase sequence comprising at least 8 contiguous nucleobases of any of the nucleobase sequences of SEQ ID NOs: 13-1941. In certain embodiments, a compound comprises a modified oligonucleotide 16 to 30 linked nucleosides in length and having a nucleobase sequence comprising the nucleobase sequence of any one of SEQ ID NOs: 13-1941. In certain embodiments, a compound comprises a modified oligonucleotide consisting of the nucleobase sequence of any one of SEQ ID NOs: 13-1941. In certain embodiments, a compound comprises a modified oligonucleotide 16 to 30 linked nucleosides in length having a nucleobase sequence comprising any one of SEQ ID NOs: 1164, 13, 76, 81, 1095, 1326, 1730, and 1925. In certain embodiments, a compound comprises a modified oligonucleotide having a nucleobase sequence consisting of any one of SEQ ID NOs: 1164, 13, 76, 81, 1095, 1326, 1730, and 1925. In certain embodiments, the compound is ION #793406, 904763, 905469, 905505, 905634, 905665, 972190, and 972163. In any of the foregoing embodiments, the compound can be single-stranded or double-stranded. In any of the foregoing embodiments, the compound can be an antisense compound or oligomeric compound.

[0172] In certain embodiments, a method of reducing or inhibiting edema, proteinuria, albuminuria, GFR decline, high lipid levels, high cholesterol levels, nephrotic syndrome, high blood pressure or hypertension, kidney damage, glomerular damage, or kidney failure in the kidney of an individual having, or at risk of having, a disease associated with APOL1 comprises administering to the individual a compound comprising a APOL1 specific inhibitor, thereby reducing or inhibiting edema, proteinuria, GFR decline, high lipid levels, high cholesterol levels, nephrotic syndrome, high blood pressure or hypertension, kidney damage, glomerular damage, or kidney failure in the individual. In certain embodiments, the individual has, or is at risk of having, an APOL1-associated nephropathy. In certain embodiments, the APOL1-associated nephropathy is one of focal segmental glomerulosclerosis (FSGS), collapsing nephropathy, CKD, hypertension attributed nephropathy, HIV-associated nephropathy, sickle cell nephropathy, arterionephro-sclerosis, lupus nephritis, ESKD, and other forms of APOL1-associated proteinuric disease. In certain embodiments, the compound comprises an antisense compound targeted to APOL1. In certain embodiments, the compound comprises an oligonucleotide targeted to APOL1. In certain embodiments, the compound comprises an antisense compound targeted to APOL1. In certain embodiments, the compound comprises an oligonucleotide targeted to APOL1. In certain embodiments, a compound comprises a modified oligonucleotide 16 to 30 linked nucleosides in length and having a nucleobase sequence comprising at least 8 contiguous nucleobases of any of the nucleobase sequences of SEQ ID NOs: 13-1941. In certain embodiments, a compound comprises a modified oligonucleotide 16 to 30 linked nucleosides in length and having a nucleobase sequence comprising the nucleobase sequence of any one of SEQ ID NOs: 13-1941. In certain embodiments, a compound comprises a modified oligonucleotide consisting of the nucleobase sequence of any one of SEQ ID NOs: 13-1941. In certain embodiments, a compound comprises a modified oligonucleotide 16 to 30 linked nucleosides in length having a nucleobase sequence comprising any one of SEQ ID NOs: 1164, 13, 76, 81, 1095, 1326, 1730, and 1925. In certain embodiments, a compound comprises a modified oligonucleotide having a nucleobase sequence consisting of any one of SEQ ID NOs: 1164, 13, 76, 81, 1095, 1326, 1730, and 1925. In certain embodiments, the compound is ION #793406, 904763, 905469, 905505, 905634, 905665, 972190, and 972163. In any of the foregoing embodiments, the compound can be single-stranded or double-stranded. In any of the foregoing embodiments, the compound can be an antisense compound or oligomeric compound. In certain embodiments, the compound is administered to the individual parenterally. In certain embodiments, the individual is identified as having or at risk of having a disease associated with APOL1.

[0173] Certain embodiments are drawn to a compound comprising a APOL1 specific inhibitor for use in treating a disease associated with APOL1. In certain embodiments, the disease is focal segmental glomerulosclerosis (FSGS), collapsing nephropathy, CKD, hypertension attributed nephropathy, HIV-associated nephropathy, sickle cell nephropathy, arterionephro-sclerosis, lupus nephritis, ESKD, or other forms of APOL1-associated proteinuric disease. In certain embodiments, the compound comprises an antisense compound targeted to APOL1. In certain embodiments, the compound comprises an oligonucleotide targeted to APOL1. In certain embodiments, a compound comprises a modified oligonucleotide 16 to 30 linked nucleosides in length and having a nucleobase sequence comprising at least 8 contiguous nucleobases of any of the nucleobase sequences of SEQ ID NOs: 13-1941. In certain embodiments, a compound comprises a modified oligonucleotide 16 to 30 linked nucleosides in length and having a nucleobase sequence comprising the nucleobase sequence of any one of SEQ ID NOs: 13-1941. In certain embodiments, a compound comprises a modified oligonucleotide consisting of the nucleobase sequence of any one of SEQ ID NOs: 13-1941. In certain embodiments, a compound comprises a modified oligonucleotide 16 to 30 linked nucleosides in length having a nucleobase sequence comprising any one of SEQ ID NOs: 1164, 13, 76, 81, 1095, 1326, 1730, and 1925. In certain embodiments, a compound comprises a modified oligonucleotide having a nucleobase sequence consisting of any one of SEQ ID NOs: 1164, 13, 76, 81, 1095, 1326, 1730, and 1925. In certain embodiments, the compound is ION #793406, 904763, 905469, 905505, 905634, 905665, 972190, and 972163. In any of the foregoing embodiments, the compound can be single-stranded or double-stranded. In any of the foregoing embodiments, the compound can be an antisense compound or oligomeric compound. In certain embodiments, the compound is administered to the individual parenterally.

[0174] Certain embodiments are drawn to a compound comprising a APOL1 specific inhibitor for use in reducing or inhibiting edema, proteinuria, albuminuria, GFR decline, high lipid levels, high cholesterol levels, nephrotic syndrome, high blood pressure or hypertension, kidney damage, glomerular damage, or kidney failure in an individual having or at risk of having an APOL1-associated nephropathy. In certain embodiments, the APOL1-associated nephropathy is one of focal segmental glomerulosclerosis (FSGS), collapsing nephropathy, CKD, hypertension attributed nephropathy, HIV-associated nephropathy, sickle cell nephropathy, arterionephro-sclerosis, lupus nephritis, ESKD, and other forms of APOL1-associated proteinuric disease. In certain embodiments, the compound comprises an antisense compound targeted to APOL1. In certain embodiments, the compound comprises an oligonucleotide targeted to APOL1. In certain embodiments, a compound comprises a modified oligonucleotide 16 to 30 linked nucleosides in length and having a nucleobase sequence comprising at least 8 contiguous nucleobases of any of the nucleobase sequences of SEQ ID NOs: 13-1941. In certain embodiments, a compound comprises a modified oligonucleotide 16 to 30 linked nucleosides in length and having a nucleobase sequence comprising the nucleobase sequence of any one of SEQ ID NOs: 13-1941. In certain embodiments, a compound comprises a modified oligonucleotide consisting of the nucleobase sequence of any one of SEQ ID NOs: 13-1941. In certain embodiments, a compound comprises a modified oligonucleotide 16 to 30 linked nucleosides in length having a nucleobase sequence comprising any one of SEQ ID NOs: 1164, 13, 76, 81, 1095, 1326, 1730, and 1925. In certain embodiments, a compound comprises a modified oligonucleotide having a nucleobase sequence consisting of any one of SEQ ID NOs: 1164, 13, 76, 81, 1095, 1326, 1730, and 1925. In certain embodiments, the compound is ION #793406, 904763, 905469, 905505, 905634, 905665, 972190, and 972163. In any of the foregoing embodiments, the compound can be single-stranded or double-stranded. In any of the foregoing embodiments, the compound can be an antisense compound or oligomeric compound.

[0175] Certain embodiments are drawn to use of a compound comprising a APOL1 specific inhibitor for the manufacture or preparation of a medicament for treating a disease associated with APOL1. Certain embodiments are drawn to use of a compound comprising a APOL1 specific inhibitor for the preparation of a medicament for treating a disease associated with APOL1. In certain embodiments, the disease is a APOL1-associated nephropathy. In certain embodiments, the disease is one of focal segmental glomerulosclerosis (FSGS), collapsing nephropathy, CKD, hypertension attributed nephropathy, HIV-associated nephropathy, sickle cell nephropathy, arterionephro-sclerosis, lupus nephritis, ESKD, and other forms of APOL1-associated proteinuric disease. In certain embodiments, the compound comprises an antisense compound targeted to APOL1. In certain embodiments, the compound comprises an oligonucleotide targeted to APOL1. In certain embodiments, the compound comprises an antisense compound targeted to APOL1. In certain embodiments, the compound comprises an oligonucleotide targeted to APOL1. In certain embodiments, a compound comprises a modified oligonucleotide 16 to 30 linked nucleosides in length and having a nucleobase sequence comprising at least 8 contiguous nucleobases of any of the nucleobase sequences of SEQ ID NOs: 13-1941. In certain embodiments, a compound comprises a modified oligonucleotide 16 to 30 linked nucleosides in length and having a nucleobase sequence comprising the nucleobase sequence of any one of SEQ ID NOs: 13-1941. In certain embodiments, a compound comprises a modified oligonucleotide consisting of the nucleobase sequence of any one of SEQ ID NOs: 13-1941. In certain embodiments, a compound comprises a modified oligonucleotide 16 to 30 linked nucleosides in length having a nucleobase sequence comprising any one of SEQ ID NOs: 1164, 13, 76, 81, 1095, 1326, 1730, and 1925. In certain embodiments, a compound comprises a modified oligonucleotide having a nucleobase sequence consisting of any one of SEQ ID NOs: 1164, 13, 76, 81, 1095, 1326, 1730, and 1925. In certain embodiments, the compound is ION #793406, 904763, 905469, 905505, 905634, 905665, 972190, and 972163. In any of the foregoing embodiments, the compound can be single-stranded or double-stranded. In any of the foregoing embodiments, the compound can be an antisense compound or oligomeric compound.

[0176] Certain embodiments are drawn to use of a compound comprising a APOL1 specific inhibitor for the manufacture or preparation of a medicament for reducing or inhibiting edema, proteinuria, albuminuria, GFR decline, high lipid levels, high cholesterol levels, nephrotic syndrome, high blood pressure or hypertension, kidney damage, glomerular damage, or kidney failure in an individual having or at risk of having a APOL1-associated nephropathy associated with APOL1. In certain embodiments, the APOL1-associated nephropathy is one of focal segmental glomerulosclerosis (FSGS), collapsing nephropathy, CKD, hypertension attributed nephropathy, HIV-associated nephropathy, sickle cell nephropathy, arterionephro-sclerosis, lupus nephritis, ESKD, and other forms of APOL1-associated proteinuric disease. Certain embodiments are drawn to use of a compound comprising a APOL1 specific inhibitor for the preparation of a medicament for treating a disease associated with APOL1. In certain embodiments, the disease is one of focal segmental glomerulosclerosis (FSGS), collapsing nephropathy, CKD, hypertension attributed nephropathy, HIV-associated nephropathy, sickle cell nephropathy, arterionephro-sclerosis, lupus nephritis, ESKD, and other forms of APOL1-associated proteinuric disease. In certain embodiments, the compound comprises an antisense compound targeted to APOL1. In certain embodiments, the compound comprises an oligonucleotide targeted to APOL1. In certain embodiments, a compound comprises a modified oligonucleotide 16 to 30 linked nucleosides in length and having a nucleobase sequence comprising at least 8 contiguous nucleobases of any of the nucleobase sequences of SEQ ID NOs: 13-1941. In certain embodiments, a compound comprises a modified oligonucleotide 16 to 30 linked nucleosides in length and having a nucleobase sequence comprising the nucleobase sequence of any one of SEQ ID NOs: 13-1941. In certain embodiments, a compound comprises a modified oligonucleotide consisting of the nucleobase sequence of any one of SEQ ID NOs: 13-1941. In certain embodiments, a compound comprises a modified oligonucleotide 16 to 30 linked nucleosides in length having a nucleobase sequence comprising any one of SEQ ID NOs: 1164, 13, 76, 81, 1095, 1326, 1730, and 1925. In certain embodiments, a compound comprises a modified oligonucleotide having a nucleobase sequence consisting of any one of SEQ ID NOs: 1164, 13, 76, 81, 1095, 1326, 1730, and 1925. In certain embodiments, the compound is ION #793406, 904763, 905469, 905505, 905634, 905665, 972190, and 972163. In any of the foregoing embodiments, the compound can be single-stranded or double-stranded. In any of the foregoing embodiments, the compound can be an antisense compound or oligomeric compound.

[0177] In any of the foregoing methods or uses, the compound can be targeted to APOL1. In certain embodiments, the compound comprises or consists of a modified oligonucleotide, for example a modified oligonucleotide 8 to 80 linked nucleosides in length, 10 to 30 linked nucleosides in length, 12 to 30 linked nucleosides in length, or 16 linked nucleosides in length. In certain embodiments, the modified oligonucleotide is at least 80%, 85%, 90%, 95% or 100% complementary to any of the nucleobase sequences recited in SEQ ID NOs: 1-9. In certain embodiments, the modified oligonucleotide comprises at least one modified internucleoside linkage, at least one modified sugar and/or at least one modified nucleobase. In certain embodiments, the modified internucleoside linkage is a phosphorothioate internucleoside linkage, the modified sugar is a bicyclic sugar or a 2′-O-methoxyethyl, and the modified nucleobase is a 5-methylcytosine. In certain embodiments, the modified oligonucleotide comprises a gap segment consisting of linked deoxynucleosides; a 5′ wing segment consisting of linked nucleosides; and a 3′ wing segment consisting of linked nucleosides, wherein the gap segment is positioned immediately adjacent to and between the 5′ wing segment and the 3′ wing segment and wherein each nucleoside of each wing segment comprises a modified sugar.

[0178] In any of the foregoing embodiments, the modified oligonucleotide is 12 to 30, 15 to 30, 15 to 25, 15 to 24, 16 to 24, 17 to 24, 18 to 24, 19 to 24, 20 to 24, 19 to 22, 20 to 22, 16 to 20, or 17 or 20 linked nucleosides in length. In certain embodiments, the modified oligonucleotide is at least 80%, 85%, 90%, 95% or 100% complementary to any of the nucleobase sequences recited in SEQ ID NOs: 1-9. In certain embodiments, the modified oligonucleotide comprises at least one modified internucleoside linkage, at least one modified sugar and/or at least one modified nucleobase. In certain embodiments, the modified internucleoside linkage is a phosphorothioate internucleoside linkage, the modified sugar is a bicyclic sugar or a 2′-O-methoxyethyl, and the modified nucleobase is a 5-methylcytosine. In certain embodiments, the modified oligonucleotide comprises a gap segment consisting of linked 2′-deoxynucleosides; a 5′ wing segment consisting of linked nucleosides; and a 3′ wing segment consisting of linked nucleosides, wherein the gap segment is positioned immediately adjacent to and between the 5′ wing segment and the 3′ wing segment and wherein each nucleoside of each wing segment comprises a modified sugar.

[0179] In any of the foregoing methods or uses, the compound comprises or consists of a modified oligonucleotide 16 to 30 linked nucleosides in length and having a nucleobase sequence comprising any one of SEQ ID NOs: 13-1941, wherein the modified oligonucleotide comprises:
[0180] a gap segment consisting of linked 2′-deoxynucleosides;
[0181] a 5′ wing segment consisting of linked nucleosides; and
[0182] a 3′ wing segment consisting of linked nucleosides;
   wherein the gap segment is positioned between the 5′ wing segment and the 3′ wing segment and wherein each nucleoside of each wing segment comprises a modified sugar.

[0183] In any of the foregoing methods or uses, the compound comprises or consists of a modified oligonucleotide 16-30 linked nucleobases in length having a nucleobase sequence comprising the sequence recited in any one of SEQ ID NOs: 13, 1095, 1730, 76, 1326, and 81, wherein the modified oligonucleotide comprises
[0184] a gap segment consisting of ten linked deoxynucleosides;
[0185] a 5′ wing segment consisting of three linked nucleosides; and
[0186] a 3′ wing segment consisting of three linked nucleosides;
   wherein the gap segment is positioned between the 5′ wing segment and the 3′ wing segment, wherein the 5′ and 3′ wing segments comprise a cEt nucleoside; wherein each internucleoside linkage is a phosphorothioate linkage; and wherein each cytosine is a 5-methylcytosine. In certain embodiments, the modified oligonucleotide is 16-30 linked nucleosides in length.

[0187] In any of the foregoing methods or uses, the compound comprises or consists of a modified oligonucleotide 16-30 linked nucleobases in length having a nucleobase sequence comprising or consisting of the sequence recited in any one of SEQ ID NOs: 1164 and 1925, wherein the modified oligonucleotide comprises:
[0188] a gap segment consisting of nine linked deoxynucleosides;
[0189] a 5′ wing segment consisting of three linked nucleoside; and
[0190] a 3′ wing segment consisting of four linked nucleosides;
   wherein the gap segment is positioned between the 5′ wing segment and the 3′ wing segment; wherein the 5′ wing segment comprises a cEt nucleosides; wherein the 3′ wing segment comprises a cEt nucleoside, a a cEt nucleoside, a cEt nucleoside, and 2′-O-methoxyethyl nucleoside in the 5′ to 3′ direction; wherein each internucleoside linkage is a phosphorothioate linkage; and wherein each cytosine is a 5-methylcytosine. In certain embodiments, the modified oligonucleotide is 16-30 linked nucleosides in length. In certain embodiments, the modified oligonucleotide is 16 linked nucleosides in length.

[0191] In any of the foregoing methods or uses, the compound comprises or consists of ION 972190 or salt thereof, having the following chemical structure:

[chemical structure]

[0192] In any of the foregoing methods or uses, the compound comprises or consists of the sodium salt of ION 972190, having the following chemical structure:

[chemical structure]

[0193] In any of the foregoing methods or uses, the compound can be administered parenterally. For example, in certain embodiments the compound can be administered through injection or infusion. Parenteral administration includes subcutaneous administration, intravenous administration, intramuscular administration, intraarterial administration, intraperitoneal administration, or intracranial administration, e.g. intrathecal or intracerebroventricular administration.

### Certain Compounds

[0194] In certain embodiments, compounds described herein can be antisense compounds. In certain embodiments, the antisense compound comprises or consists of an oligomeric compound. In certain embodiments, the oligomeric compound comprises a modified oligonucleotide. In certain embodiments, the modified oligonucleotide has a nucleobase sequence complementary to that of a target nucleic acid.

[0195] In certain embodiments, a compound described herein comprises or consists of a modified oligonucleotide. In certain embodiments, the modified oligonucleotide has a nucleobase sequence complementary to that of a target nucleic acid.

[0196] In certain embodiments, a compound or antisense compound is single-stranded. Such a single-stranded compound or antisense compound comprises or consists of an oligomeric compound. In certain embodiments, such an oligomeric compound comprises or consists of an oligonucleotide and optionally a conjugate group. In certain embodiments, the oligonucleotide is an antisense oligonucleotide. In certain embodiments, the oligonucleotide is modified. In certain embodiments, the oligonucleotide of a single-stranded antisense compound or oligomeric compound comprises a self-complementary nucleobase sequence.

[0197] In certain embodiments, compounds are double-stranded. Such double-stranded compounds comprise a first modified oligonucleotide having a region complementary to a target nucleic acid and a second modified oligonucleotide having a region complementary to the first modified oligonucleotide. In certain embodiments, the modified oligonucleotide is an RNA oligonucleotide. In such embodiments, the thymine nucleobase in the modified oligonucleotide is replaced by a uracil nucleobase. In certain embodiments, compound comprises a conjugate group. In certain embodiments, one of the modified oligonucleotides is conjugated. In certain embodiments, both the modified oligonucleotides are conjugated. In certain embodiments, the first modified oligonucleotide is conjugated. In certain embodiments, the second modified oligonucleotide is conjugated. In certain embodiments, the first modified oligonucleotide is 12-30 linked nucleosides in length and the second modified oligonucleotide is 12-30 linked nucleosides in length. In certain embodiments, one of the modified oligonucleotides has a nucleobase sequence comprising at least 8 contiguous nucleobases of any of SEQ ID NOs: 13-1941.

[0198] In certain embodiments, antisense compounds are double-stranded. Such double-stranded antisense compounds comprise a first oligomeric compound having a region complementary to a target nucleic acid and a second oligomeric compound having a region complementary to the first oligomeric compound. The first oligomeric compound of such double stranded antisense compounds typically comprises or consists of a modified oligonucleotide and optionally a conjugate group. The oligonucleotide of the second oligomeric compound of such double-stranded antisense compound may be modified or unmodified. Either or both oligomeric compounds of a double-stranded antisense compound may comprise a conjugate group. The oligomeric compounds of double-stranded antisense compounds may include non-complementary overhanging nucleosides.

[0199] Examples of single-stranded and double-stranded compounds include but are not limited to oligonucleotides, siRNAs, microRNA targeting oligonucleotides, and single-stranded RNAi compounds, such as small hairpin RNAs (shRNAs), single-stranded siRNAs (ssRNAs), and microRNA mimics.

[0200] In certain embodiments, a compound described herein has a nucleobase sequence that, when written in the 5′ to 3′ direction, comprises the reverse complement of the target segment of a target nucleic acid to which it is targeted.

[0201] In certain embodiments, a compound described herein comprises an oligonucleotide 10 to 30 linked subunits in length. In certain embodiments, a compound described herein comprises an oligonucleotide 12 to 30 linked subunits in length. In certain embodiments, a compound described herein comprises an oligonucleotide 12 to 22 linked subunits in length. In certain embodiments, compound escribed herein comprises an oligonucleotide 14 to 30 linked subunits in length. In certain embodiments, compound described herein comprises an oligonucleotide 14 to 20 linked subunits in length. In certain embodiments, a compound described herein comprises an oligonucleotide 15 to 30 linked subunits in length. In certain embodiments, a compound described herein comprises an oligonucleotide 15 to 20 linked subunits in length. In certain embodiments, a compound described herein comprises an oligonucleotide 16 to 30 linked subunits in length. In certain embodiments, a compound described herein comprises an oligonucleotide 16 to 20 linked subunits in length. In certain embodiments, a compound described herein comprises an oligonucleotide 17 to 30 linked subunits in length. In certain embodiments, a compound described herein comprises an oligonucleotide 17 to 20 linked subunits in length. In certain embodiments, a compound described herein comprises an oligonucleotide 18 to 30 linked subunits in length. In certain embodiments, a compound described herein comprises an oligonucleotide 18 to 21 linked subunits in length. In certain embodiments, a compound described herein comprises an oligonucleotide 18 to 20 linked subunits in length. In certain embodiments, a compound described herein comprises an oligonucleotide 20 to 30 linked subunits in length. In other words, such oligonucleotides are 12 to 30 linked subunits, 14 to 30 linked subunits, 14 to 20 subunits, 15 to 30 subunits, 15 to 20 subunits, 16 to 30 subunits, 16 to 20 subunits, 17 to 30 subunits, 17 to 20 subunits, 18 to 30 subunits, 18 to 20 subunits, 18 to 21 subunits, 20 to 30 subunits, or 12 to 22 linked subunits in length, respectively. In certain embodiments, a compound described herein comprises an oligonucleotide 14 linked subunits in length. In certain embodiments, a compound described herein comprises an oligonucleotide 16 linked subunits in length. In certain embodiments, a compound described herein comprises an oligonucleotide 17 linked subunits in length. In certain embodiments, compound described herein comprises an oligonucleotide 18 linked subunits in length. In certain embodiments, a compound described herein comprises an oligonucleotide 19 linked subunits in length. In certain embodiments, a compound described herein comprises an oligonucleotide 20 linked subunits in length. In other embodiments, a compound described herein comprises an oligonucleotide 8 to 80, 12 to 50, 13 to 30, 13 to 50, 14 to 30, 14 to 50, 15 to 30, 15 to 50, 16 to 30, 16 to 50, 17 to 30, 17 to 50, 18 to 22, 18 to 24, 18 to 30, 18 to 50, 19 to 22, 19 to 30, 19 to 50, or 20 to 30 linked subunits. In certain such embodiments, the compound described herein comprises an oligonucleotide 8, 9, 10, 11, 12, 13, 14, 15, 16, 17, 18, 19, 20, 21, 22, 23, 24, 25, 26, 27, 28, 29, 30, 31, 32, 33, 34, 35, 36, 37, 38, 39, 40, 41, 42, 43, 44, 45, 46, 47, 48, 49, 50, 51, 52, 53, 54, 55, 56, 57, 58, 59, 60, 61, 62, 63, 64, 65, 66, 67, 68, 69, 70, 71, 72, 73, 74, 75, 76, 77, 78, 79, or 80 linked subunits in length, or a range defined by any two of the above values. In some embodiments the linked subunits are nucleotides, nucleosides, or nucleobases.

[0202] In certain embodiments, the compound may further comprise additional features or elements, such as a conjugate group, that are attached to the oligonucleotide. In certain embodiments, such compounds are antisense compounds. In certain embodiments, such compounds are oligomeric compounds. In embodiments where a conjugate group comprises a nucleoside (i.e. a nucleoside that links the conjugate group to the oligonucleotide), the nucleoside of the conjugate group is not counted in the length of the oligonucleotide.

[0203] In certain embodiments, compounds may be shortened or truncated. For example, a single subunit may be deleted from the 5′ end (5′ truncation), or alternatively from the 3′ end (3′ truncation). A shortened or truncated compound targeted to an APOL1 nucleic acid may have two subunits deleted from the 5′ end, or alternatively may have two subunits deleted from the 3′ end, of the compound. Alternatively, the deleted nucleosides may be dispersed throughout the compound.

[0204] When a single additional subunit is present in a lengthened compound, the additional subunit may be located at the 5′ or 3′ end of the compound. When two or more additional subunits are present, the added subunits may be adjacent to each other, for example, in a compound having two subunits added to the 5′ end (5′ addition), or alternatively to the 3′ end (3′ addition), of the compound. Alternatively, the added subunits may be dispersed throughout the compound.

[0205] It is possible to increase or decrease the length of a compound, such as an oligonucleotide, and/or introduce mismatch bases without eliminating activity (Woolf et al. Proc. Natl. Acad. Sci. USA 1992, 89:7305-7309; Gautschi et al. J. Natl. Cancer Inst. March 2001, 93:463-471; Maher and Dolnick Nuc. Acid. Res. 1998, 16:3341-3358). However, seemingly small changes in oligonucleotide sequence, chemistry and motif can make large differences in one or more of the many properties required for clinical development (Seth et al. J. Med. Chem. 2009, 52, 10; Egli et al. J. Am. Chem. Soc. 2011, 133, 16642).

[0206] In certain embodiments, compounds described herein are interfering RNA compounds (RNAi), which include double-stranded RNA compounds (also referred to as short-interfering RNA or siRNA) and single-stranded RNAi compounds (or ssRNA). Such compounds work at least in part through the RISC pathway to degrade and/or sequester a target nucleic acid (thus, include microRNA/microRNA-mimic compounds). As used herein, the term siRNA is meant to be equivalent to other terms used to describe nucleic acid molecules that are capable of mediating sequence specific RNAi, for example short interfering RNA (siRNA), double-stranded RNA (dsRNA), micro-RNA (miRNA), short hairpin RNA (shRNA), short interfering oligonucleotide, short interfering nucleic acid, short interfering modified oligonucleotide, chemically modified siRNA, post-transcriptional gene silencing RNA (ptgsRNA), and others. In addition, as used herein, the term “RNAi” is meant to be equivalent to other terms used to describe sequence specific RNA interference, such as post transcriptional gene silencing, translational inhibition, or epigenetics.

[0207] In certain embodiments, a compound described herein can comprise any of the oligonucleotide sequences targeted to APOL1 described herein. In certain embodiments, the compound can be double-stranded. In certain embodiments, the compound comprises a first strand comprising at least an 8, 9, 10, 11, 12, 13, 14, 15, 16, 17, 18, 19, or 20 contiguous nucleobase portion of any one of SEQ ID NOs: 13-1941 and a second strand. In certain embodiments, the compound comprises a first strand comprising the nucleobase sequence of any one of SEQ ID NOs: 13-1941 and a second strand. In certain embodiments, the compound comprises ribonucleotides in which the first strand has uracil (U) in place of thymine (T) in any one of SEQ ID NOs13-1941. In certain embodiments, the compound comprises (i) a first strand comprising a nucleobase sequence complementary to the site on APOL1 to which any of SEQ ID NOs: 13-1941 is targeted, and (ii) a second strand. In certain embodiments, the compound comprises one or more modified nucleotides in which the 2′ position in the sugar contains a halogen (such as fluorine group; 2′-F) or contains an alkoxy group (such as a methoxy group; 2′-OMe). In certain embodiments, the compound comprises at least one 2′-F sugar modification and at least one 2′-OMe sugar modification. In certain embodiments, the at least one 2′-F sugar modification and at least one 2′-OMe sugar modification are arranged in an alternating pattern for at least 2, 3, 4, 5, 6, 7, 8, 9, 10, 11, 12, 13, 14, 15, 16, 17, 18, 19, or 20 contiguous nucleobases along a strand of the dsRNA compound. In certain embodiments, the compound comprises one or more linkages between adjacent nucleotides other than a naturally-occurring phosphodiester linkage. Examples of such linkages include phosphoramide, phosphorothioate, and phosphorodithioate linkages. The compounds may also be chemically modified nucleic acid molecules as taught in U.S. Pat. No. 6,673,661. In other embodiments, the compound contains one or two capped strands, as disclosed, for example, by WO 00/63364, filed Apr. 19, 2000.

[0208] In certain embodiments, the first strand of the compound is an siRNA guide strand and the second strand of the compound is an siRNA passenger strand. In certain embodiments, the second strand of the compound is complementary to the first strand. In certain embodiments, each strand of the compound is 16, 17, 18, 19, 20, 21, 22, or 23 linked nucleosides in length. In certain embodiments, the first or second strand of the compound can comprise a conjugate group.

[0209] In certain embodiments, a compound described herein can comprise any of the oligonucleotide sequences targeted to APOL1 described herein. In certain embodiments, the compound is single stranded. In certain embodiments, such a compound is a single-stranded RNAi (ssRNAi) compound. In certain embodiments, the compound comprises at least an 8, 9, 10, 11, 12, 13, 14, 15, 16, 17, 18, 19, or 20 contiguous nucleobase portion of any one of SEQ ID NOs: 13-1941. In certain embodiments, the compound comprises the nucleobase sequence of any one of SEQ ID NOs: 13-1941. In certain embodiments, the compound comprises ribonucleotides in which uracil (U) is in place of thymine (T) in any one of SEQ ID NOs: 13-1941. In certain embodiments, the compound comprises a nucleobase sequence complementary to the site on APOL1 to which any of SEQ ID NOs: 13-1941 is targeted. In certain embodiments, the compound comprises one or more modified nucleotides in which the 2′ position in the sugar contains a halogen (such as fluorine group; 2′-F) or contains an alkoxy group (such as a methoxy group; 2′-OMe). In certain embodiments, the compound comprises at least one 2′-F sugar modification and at least one 2′-OMe sugar modification. In certain embodiments, the at least one 2′-F sugar modification and at least one 2′-OMe sugar modification are arranged in an alternating pattern for at least 2, 3, 4, 5, 6, 7, 8, 9, 10, 11, 12, 13, 14, 15, 16, 17, 18, 19, or 20 contiguous nucleobases along a strand of the compound. In certain embodiments, the compound comprises one or more linkages between adjacent nucleotides other than a naturally-occurring phosphodiester linkage. Examples of such linkages include phosphoramide, phosphorothioate, and phosphorodithioate linkages. The compounds may also be chemically modified nucleic acid molecules as taught in U.S. Pat. No. 6,673,661. In other embodiments, the compound contains a capped strand, as disclosed, for example, by WO 00/63364, filed Apr. 19, 2000. In certain embodiments, the compound consists of 16, 17, 18, 19, 20, 21, 22, or 23 linked nucleosides. In certain embodiments, the compound can comprise a conjugate group.

### Certain Mechanisms

[0210] In certain embodiments, compounds described herein comprise or consist of modified oligonucleotides. In certain embodiments, compounds described herein are antisense compounds. In certain embodiments, compounds comprise oligomeric compounds. In certain embodiments, compounds described herein are capable of hybridizing to a target nucleic acid, resulting in at least one antisense activity. In certain embodiments, compounds described herein selectively affect one or more target nucleic acid. Such compounds comprise a nucleobase sequence that hybridizes to one or more target nucleic acid, resulting in one or more desired antisense activity and does not hybridize to one or more non-target nucleic acid or does not hybridize to one or more non-target nucleic acid in such a way that results in a significant undesired antisense activity.

[0211] In certain antisense activities, hybridization of a compound described herein to a target nucleic acid results in recruitment of a protein that cleaves the target nucleic acid. For example, certain compounds described herein result in RNase H mediated cleavage of the target nucleic acid. RNase H is a cellular endonuclease that cleaves the RNA strand of an RNA:DNA duplex. The DNA in such an RNA:DNA duplex need not be unmodified DNA. In certain embodiments, compounds described herein are sufficiently “DNA-like” to elicit RNase H activity. Further, in certain embodiments, one or more non-DNA-like nucleoside in the gap of a gapmer is tolerated.

[0212] In certain antisense activities, compounds described herein or a portion of the compound is loaded into an RNA-induced silencing complex (RISC), ultimately resulting in cleavage of the target nucleic acid. For example, certain compounds described herein result in cleavage of the target nucleic acid by Argonaute. Compounds that are loaded into RISC are RNAi compounds. RNAi compounds may be double-stranded (siRNA) or single-stranded (ssRNA).

[0213] In certain embodiments, hybridization of compounds described herein to a target nucleic acid does not result in recruitment of a protein that cleaves that target nucleic acid. In certain such embodiments, hybridization of the compound to the target nucleic acid results in alteration of splicing of the target nucleic acid. In certain embodiments, hybridization of the compound to a target nucleic acid results in inhibition of a binding interaction between the target nucleic acid and a protein or other nucleic acid. In certain such embodiments, hybridization of the compound to a target nucleic acid results in alteration of translation of the target nucleic acid.

[0214] Antisense activities may be observed directly or indirectly. In certain embodiments, observation or detection of an antisense activity involves observation or detection of a change in an amount of a target nucleic acid or protein encoded by such target nucleic acid, a change in the ratio of splice variants of a nucleic acid or protein, and/or a phenotypic change in a cell or animal.

### Target Nucleic Acids, Target Regions and Nucleotide Sequences

[0215] In certain embodiments, compounds described herein comprise or consist of an oligonucleotide comprising a region that is complementary to a target nucleic acid. In certain embodiments, the target nucleic acid is an endogenous RNA molecule. In certain embodiments, the target nucleic acid encodes a protein. In certain such embodiments, the target nucleic acid is selected from: an mRNA and a pre-mRNA, including intronic, exonic and untranslated regions. In certain embodiments, the target RNA is an mRNA. In certain embodiments, the target nucleic acid is a pre-mRNA. In certain such embodiments, the target region is entirely within an intron. In certain embodiments, the target region spans an intron/exon junction. In certain embodiments, the target region is at least 50% within an intron.

[0216] Nucleotide sequences that encode APOL1 include, without limitation, the following: RefSEQ No. NM_003661.3 (incorporated by reference, disclosed herein as SEQ ID NO: 1), NT_011520.9 truncated from nucleotides 15986452 to 16001905 (SEQ ID NO: 2), NM_001136541.1 (SEQ ID NO: 3), NM_001136540.1 (SEQ ID NO: 4), NM_145343.2 (SEQ ID NO: 5), DC339680.1 (SEQ ID NO: 6), AK309143.1 (SEQ ID NO: 7), NT_011520.13 truncated from nucleotides 17543446 to 17543655 (SEQ ID NO: 8), or NC_000022.11 truncated from nucleotides 36250001 to 36271000 (SEQ ID NO: 9).

### Hybridization

[0217] In some embodiments, hybridization occurs between a compound disclosed herein and a APOL1 nucleic acid. The most common mechanism of hybridization involves hydrogen bonding (e.g., Watson-Crick, Hoogsteen or reversed Hoogsteen hydrogen bonding) between complementary nucleobases of the nucleic acid molecules.

[0218] Hybridization can occur under varying conditions. Hybridization conditions are sequence-dependent and are determined by the nature and composition of the nucleic acid molecules to be hybridized.

[0219] Methods of determining whether a sequence is specifically hybridizable to a target nucleic acid are well known in the art. In certain embodiments, the compounds provided herein are specifically hybridizable with a APOL1 nucleic acid.

### Complementarity

[0220] An oligonucleotide is said to be complementary to another nucleic acid when the nucleobase sequence of such oligonucleotide or one or more regions thereof matches the nucleobase sequence of another oligonucleotide or nucleic acid or one or more regions thereof when the two nucleobase sequences are aligned in opposing directions. Nucleobase matches or complementary nucleobases, as described herein, are limited to the following pairs: adenine (A) and thymine (T), adenine (A) and uracil (U), cytosine (C) and guanine (G), and 5-methyl cytosine (mC) and guanine (G) unless otherwise specified. Complementary oligonucleotides and/or nucleic acids need not have nucleobase complementarity at each nucleoside and may include one or more nucleobase mismatches. An oligonucleotide is fully complementary or 100% complementary when such oligonucleotides have nucleobase matches at each nucleoside without any nucleobase mismatches.

[0221] In certain embodiments, compounds described herein comprise or consist of modified oligonucleotides. In certain embodiments, compounds described herein are antisense compounds. In certain embodiments, compounds comprise oligomeric compounds. Non-complementary nucleobases between a compound and a APOL1 nucleic acid may be tolerated provided that the compound remains able to specifically hybridize to a target nucleic acid. Moreover, a compound may hybridize over one or more segments of a APOL1 nucleic acid such that intervening or adjacent segments are not involved in the hybridization event (e.g., a loop structure, mismatch or hairpin structure).

[0222] In certain embodiments, the compounds provided herein, or a specified portion thereof, are, are at least, or are up to 70%, 80%, 85%, 86%, 87%, 88%, 89%, 90%, 91%, 92%, 93%, 94%, 95%, 96%, 97%, 98%, 99%, or 100% complementary to a APOL1 nucleic acid, a target region, target segment, or specified portion thereof. In certain embodiments, the compounds provided herein, or a specified portion thereof, are 70% to 75%, 75% to 80%, 80% to 85%, 85% to 90%, 90% to 95%, 95% to 100%, or any number in between these ranges, complementary to a APOL1 nucleic acid, a target region, target segment, or specified portion thereof. Percent complementarity of a compound with a target nucleic acid can be determined using routine methods.

[0223] For example, a compound in which 18 of 20 nucleobases of the compound are complementary to a target region, and would therefore specifically hybridize, would represent 90 percent complementarity. In this example, the remaining non-complementary nucleobases may be clustered or interspersed with complementary nucleobases and need not be contiguous to each other or to complementary nucleobases. As such, a compound which is 18 nucleobases in length having four non-complementary nucleobases which are flanked by two regions of complete complementarity with the target nucleic acid would have 77.8% overall complementarity with the target nucleic acid. Percent complementarity of a compound with a region of a target nucleic acid can be determined routinely using BLAST programs (basic local alignment search tools) and PowerBLAST programs known in the art (Altschul et al., J. Mol. Biol., 1990, 215, 403 410; Zhang and Madden, Genome Res., 1997, 7, 649 656). Percent homology, sequence identity or complementarity, can be determined by, for example, the Gap program (Wisconsin Sequence Analysis Package, Version 8 for Unix, Genetics Computer Group, University Research Park, Madison Wis.), using default settings, which uses the algorithm of Smith and Waterman (Adv. Appl. Math., 1981, 2, 482 489).

[0224] In certain embodiments, compounds described herein, or specified portions thereof, are fully complementary (i.e. 100% complementary) to a target nucleic acid, or specified portion thereof. For example, a compound may be fully complementary to a APOL1 nucleic acid, or a target region, or a target segment or target sequence thereof. As used herein, “fully complementary” means each nucleobase of a compound is complementary to the corresponding nucleobase of a target nucleic acid. For example, a 20 nucleobase compound is fully complementary to a target sequence that is 400 nucleobases long, so long as there is a corresponding 20 nucleobase portion of the target nucleic acid that is fully complementary to the compound. Fully complementary can also be used in reference to a specified portion of the first and/or the second nucleic acid. For example, a 20 nucleobase portion of a 30 nucleobase compound can be “fully complementary” to a target sequence that is 400 nucleobases long. The 20 nucleobase portion of the 30 nucleobase compound is fully complementary to the target sequence if the target sequence has a corresponding 20 nucleobase portion wherein each nucleobase is complementary to the 20 nucleobase portion of the compound. At the same time, the entire 30 nucleobase compound may or may not be fully complementary to the target sequence, depending on whether the remaining 10 nucleobases of the compound are also complementary to the target sequence.

[0225] In certain embodiments, compounds described herein comprise one or more mismatched nucleobases relative to the target nucleic acid. In certain such embodiments, antisense activity against the target is reduced by such mismatch, but activity against a non-target is reduced by a greater amount. Thus, in certain such embodiments selectivity of the compound is improved. In certain embodiments, the mismatch is specifically positioned within an oligonucleotide having a gapmer motif. In certain such embodiments, the mismatch is at position 1, 2, 3, 4, 5, 6, 7, or 8 from the 5′-end of the gap region. In certain such embodiments, the mismatch is at position 9, 8, 7, 6, 5, 4, 3, 2, 1 from the 3′-end of the gap region. In certain such embodiments, the mismatch is at position 1, 2, 3, or 4 from the 5′-end of the wing region. In certain such embodiments, the mismatch is at position 4, 3, 2, or 1 from the 3′-end of the wing region. In certain embodiments, the mismatch is specifically positioned within an oligonucleotide not having a gapmer motif. In certain such embodiments, the mismatch is at position 1, 2, 3, 4, 5, 6, 7, 8, 9, 10, 11, or 12 from the 5′-end of the oligonucleotide. In certain such embodiments, the mismatch is at position, 2, 3, 4, 5, 6, 7, 8, 9, 10, 11, or 12 from the 3′-end of the oligonucleotide.

[0226] The location of a non-complementary nucleobase may be at the 5′ end or 3′ end of the compound. Alternatively, the non-complementary nucleobase or nucleobases may be at an internal position of the compound. When two or more non-complementary nucleobases are present, they may be contiguous (i.e. linked) or non-contiguous. In one embodiment, a non-complementary nucleobase is located in the wing segment of a gapmer oligonucleotide.

[0227] In certain embodiments, compounds described herein that are, or are up to 11, 12, 13, 14, 15, 16, 17, 18, 19, or 20 nucleobases in length comprise no more than 4, no more than 3, no more than 2, or no more than 1 non-complementary nucleobase(s) relative to a target nucleic acid, such as a APOL1 nucleic acid, or specified portion thereof.

[0228] In certain embodiments, compounds described herein that are, or are up to 11, 12, 13, 14, 15, 16, 17, 18, 19, 20, 21, 22, 23, 24, 25, 26, 27, 28, 29, or 30 nucleobases in length comprise no more than 6, no more than 5, no more than 4, no more than 3, no more than 2, or no more than 1 non-complementary nucleobase(s) relative to a target nucleic acid, such as a APOL1 nucleic acid, or specified portion thereof.

[0229] In certain embodiments, compounds described herein also include those which are complementary to a portion of a target nucleic acid. As used herein, “portion” refers to a defined number of contiguous (i.e. linked) nucleobases within a region or segment of a target nucleic acid. A “portion” can also refer to a defined number of contiguous nucleobases of a compound. In certain embodiments, the compounds, are complementary to at least an 8 nucleobase portion of a target segment. In certain embodiments, the compounds are complementary to at least a 9 nucleobase portion of a target segment. In certain embodiments, the compounds are complementary to at least a 10 nucleobase portion of a target segment. In certain embodiments, the compounds are complementary to at least an 11 nucleobase portion of a target segment. In certain embodiments, the compounds are complementary to at least a 12 nucleobase portion of a target segment. In certain embodiments, the compounds are complementary to at least a 13 nucleobase portion of a target segment. In certain embodiments, the compounds are complementary to at least a 14 nucleobase portion of a target segment. In certain embodiments, the compounds are complementary to at least a 15 nucleobase portion of a target segment. In certain embodiments, the compounds are complementary to at least a 16 nucleobase portion of a target segment. Also contemplated are compounds that are complementary to at least a 9, 10, 11, 12, 13, 14, 15, 16, 17, 18, 19, 20, or more nucleobase portion of a target segment, or a range defined by any two of these values.

### Identity

[0230] The compounds provided herein may also have a defined percent identity to a particular nucleotide sequence, SEQ ID NO, or compound represented by a specific ION number, or portion thereof. In certain embodiments, compounds described herein are antisense compounds or oligomeric compounds. In certain embodiments, compounds described herein are modified oligonucleotides. As used herein, a compound is identical to the sequence disclosed herein if it has the same nucleobase pairing ability. For example, a RNA which contains uracil in place of thymidine in a disclosed DNA sequence would be considered identical to the DNA sequence since both uracil and thymidine pair with adenine. Shortened and lengthened versions of the compounds described herein as well as compounds having non-identical bases relative to the compounds provided herein also are contemplated. The non-identical bases may be adjacent to each other or dispersed throughout the compound. Percent identity of an compound is calculated according to the number of bases that have identical base pairing relative to the sequence to which it is being compared.

[0231] In certain embodiments, compounds described herein, or portions thereof, are, or are at least, 70%, 75%, 80%, 85%, 90%, 91%, 92%, 93%, 94%, 95%, 96%, 97%, 98%, 99% or 100% identical to one or more of the compounds or SEQ ID NOs, or a portion thereof, disclosed herein. In certain embodiments, compounds described herein are about 70%, 75%, 80%, 85%, 90%, 91%, 92%, 93%, 94%, 95%, 96%, 97%, 98%, or 99% identical, or any percentage between such values, to a particular nucleotide sequence, SEQ ID NO, or compound represented by a specific ION number, or portion thereof, in which the compounds comprise an oligonucleotide having one or more mismatched nucleobases. In certain such embodiments, the mismatch is at position 1, 2, 3, 4, 5, 6, 7, 8, 9, 10, 11, or 12 from the 5′-end of the oligonucleotide. In certain such embodiments, the mismatch is at position, 2, 3, 4, 5, 6, 7, 8, 9, 10, 11, or 12 from the 3′-end of the oligonucleotide.

[0232] In certain embodiments, compounds described herein comprise or consist of antisense compounds. In certain embodiments, a portion of the antisense compound is compared to an equal length portion of the target nucleic acid. In certain embodiments, an 8, 9, 10, 11, 12, 13, 14, 15, 16, 17, 18, 19, 20, 21, 22, 23, 24, or 25 nucleobase portion is compared to an equal length portion of the target nucleic acid.

[0233] In certain embodiments, compounds described herein comprise or consist of oligonucleotides. In certain embodiments, a portion of the oligonucleotide is compared to an equal length portion of the target nucleic acid. In certain embodiments, an 8, 9, 10, 11, 12, 13, 14, 15, 16, 17, 18, 19, 20, 21, 22, 23, 24, or 25 nucleobase portion is compared to an equal length portion of the target nucleic acid.

### Certain Modified Compounds

[0234] In certain embodiments, compounds described herein comprise or consist of oligonucleotides consisting of linked nucleosides. Oligonucleotides may be unmodified oligonucleotides (RNA or DNA) or may be modified oligonucleotides. Modified oligonucleotides comprise at least one modification relative to unmodified RNA or DNA (i.e., comprise at least one modified nucleoside (comprising a modified sugar moiety and/or a modified nucleobase) and/or at least one modified internucleoside linkage).

[0235] A. Modified Nucleosides

[0236] Modified nucleosides comprise a modified sugar moiety or a modified nucleobase or both a modified sugar moiety and a modified nucleobase.

[0237] 1. Modified Sugar Moieties

[0238] In certain embodiments, sugar moieties are non-bicyclic modified sugar moieties. In certain embodiments, modified sugar moieties are bicyclic or tricyclic sugar moieties. In certain embodiments, modified sugar moieties are sugar surrogates. Such sugar surrogates may comprise one or more substitutions corresponding to those of other types of modified sugar moieties.

[0239] In certain embodiments, modified sugar moieties are non-bicyclic modified furanosyl sugar moieties comprising one or more acyclic substituent, including but not limited to substituents at the 2′, 4′, and/or 5′ positions. In certain embodiments, the furanosyl sugar moiety is a ribosyl sugar moiety. In certain embodiments one or more acyclic substituent of non-bicyclic modified sugar moieties is branched. Examples of 2′-substituent groups suitable for non-bicyclic modified sugar moieties include but are not limited to: 2′-F, 2′-OCH₃ (“OMe” or “O-methyl”), and 2′-O(CH₂)₂OCH₃ (“MOE”). In certain embodiments, 2′-substituent groups are selected from among: halo, allyl, amino, azido, SH, CN, OCN, CF₃, OCF₃, O—C₁-C₁₀ alkoxy, O—C₁-C₁₀ substituted alkoxy, O—C₁-C₁₀ alkyl, O—C₁-C₁₀ substituted alkyl, S-alkyl, N(Rₘ)-alkyl, O-alkenyl, S-alkenyl, N(Rₘ)-alkenyl, O-alkynyl, S-alkynyl, N(Rₘ)-alkynyl, O-alkylenyl-O-alkyl, alkynyl, alkaryl, aralkyl, O-alkaryl, O-aralkyl, O(CH₂)₂SCH₃, O(CH₂)₂ON(Rₘ)(Rₙ) or OCH₂C(═O)—N(Rₘ)(Rₙ), where each Rₘ and Rₙ is, independently, H, an amino protecting group, or substituted or unsubstituted C₁-C₁₀ alkyl, and the 2′-substituent groups described in Cook et al., U.S. Pat. No. 6,531,584; Cook et al., U.S. Pat. No. 5,859,221; and Cook et al., U.S. Pat. No. 6,005,087. Certain embodiments of these 2′-substituent groups can be further substituted with one or more substituent groups independently selected from among: hydroxyl, amino, alkoxy, carboxy, benzyl, phenyl, nitro (NO₂), thiol, thioalkoxy, thioalkyl, halogen, alkyl, aryl, alkenyl and alkynyl. Examples of 4′-substituent groups suitable for linearly non-bicyclic modified sugar moieties include but are not limited to alkoxy (e.g., methoxy), alkyl, and those described in Manoharan et al., WO 2015/106128. Examples of 5′-substituent groups suitable for non-bicyclic modified sugar moieties include but are not limited to: 5′-methyl (R or S), 5′-vinyl, and 5′-methoxy. In certain embodiments, non-bicyclic modified sugars comprise more than one non-bridging sugar substituent, for example, 2′-F-5′-methyl sugar moieties and the modified sugar moieties and modified nucleosides described in Migawa et al., WO 2008/101157 and Rajeev et al., US2013/0203836.

[0240] In certain embodiments, a 2′-substituted nucleoside or 2′-non-bicyclic modified nucleoside comprises a sugar moiety comprising a linear 2′-substituent group selected from: F, NH₂, N₃, OCF₃, OCH₃, O(CH₂)₃NH₂, CH₂CH═CH₂, OCH₂CH═CH₂, OCH₂CH₂OCH₃, O(CH₂)₂SCH₃, O(CH₂)₂ON(Rₘ)(Rₙ), O(CH₂)₂O(CH₂)₂N(CH₃)₂, and N-substituted acetamide (OCH₂C(═O)—N(Rₘ)(Rₙ)), where each Rₘ and Rₙ is, independently, H, an amino protecting group, or substituted or unsubstituted C₁-C₁₀ alkyl.

[0241] In certain embodiments, a 2′-substituted nucleoside or 2′-non-bicyclic modified nucleoside comprises a sugar moiety comprising a linear 2′-substituent group selected from: F, OCF₃, OCH₃, OCH₂CH₂OCH₃, O(CH₂)₂SCH₃, O(CH₂)₂ON(CH₃)₂, O(CH₂)₂O(CH₂)₂N(CH₃)₂, and OCH₂C(═O)—N(H)CH₃ (“NMA”).

[0242] In certain embodiments, a 2′-substituted nucleoside or 2′-non-bicyclic modified nucleoside comprises a sugar moiety comprising a linear 2′-substituent group selected from: F, OCH₃, and OCH₂CH₂OCH₃.

[0243] Nucleosides comprising modified sugar moieties, such as non-bicyclic modified sugar moieties, are referred to by the position(s) of the substitution(s) on the sugar moiety of the nucleoside. For example, nucleosides comprising 2′-substituted or 2-modified sugar moieties are referred to as 2′-substituted nucleosides or 2-modified nucleosides.

[0244] Certain modified sugar moieties comprise a bridging sugar substituent that forms a second ring resulting in a bicyclic sugar moiety. In certain such embodiments, the bicyclic sugar moiety comprises a bridge between the 4′ and the 2′ furanose ring atoms. In certain such embodiments, the furanose ring is a ribose ring. Examples of such 4′ to 2′ bridging sugar substituents include but are not limited to: 4′-CH₂-2′, 4′-(CH₂)₂-2′, 4′-(CH₂)₃-2′, (“LNA”), 4′-(CH₂)₂—O-2′ (“ENA”), 4′-CH(CH₃)—O-2′ (referred to as “constrained ethyl” or “cEt” when in the S configuration), 4′-CH₂—O—CH₂-2′, 4′-CH₂—N(R)-2′, 4′-CH(CH₂OCH₃)—O-2′ (“constrained MOE” or “cMOE”) and analogs thereof (see, e.g., Seth et al., U.S. Pat. No. 7,399,845, Bhat et al., U.S. Pat. No. 7,569,686, Swayze et al., U.S. Pat. No. 7,741,457, and Swayze et al., U.S. Pat. No. 8,022,193), 4′-C(CH₃)(CH₃)—O-2′ and analogs thereof (see, e.g., Seth et al., U.S. Pat. No. 8,278,283), 4′-CH₂—N(OCH₃)-2′ and analogs thereof (see, e.g., Prakash et al., U.S. Pat. No. 8,278,425), 4′-CH₂—O—N(CH₃)-2′ (see, e.g., Allerson et al., U.S. Pat. No. 7,696,345 and Allerson et al., U.S. Pat. No. 8,124,745), 4′-CH₂—C(H)(CH₃)-2′ (see, e.g., Zhou, et al., J. Org. Chem., 2009, 74, 118-134), 4′-CH₂—C(═CH₂)-2′ and analogs thereof (see e.g., Seth et al., U.S. Pat. No. 8,278,426), 4′-C(RₐR_{b})—N(R)—O-2′, 4′-C(RₐR_{b})—O—N(R)-2′, 4′-CH₂—O—N(R)-2′, and 4′-CH₂—N(R)—O-2′, wherein each R, Rₐ, and R_{b} is, independently, H, a protecting group, or Ci-Cu alkyl (see, e.g. Imanishi et al., U.S. Pat. No. 7,427,672).

[0245] In certain embodiments, such 4′ to 2′ bridges independently comprise from 1 to 4 linked groups independently selected from: —[C(Rₐ)(R_{b})]ₙ—, —[C(Rₐ)(R_{b})]ₙ—O—, —C(Rₐ)═C(R_{b}), —C(Rₐ)═N—, —C(═NRₐ)—, —C(═O)—, —C(═S)—, —O—, —Si(Rₐ)₂—, —S(═O)ₓ—, and —N(Rₐ)—;
[0246] wherein:
[0247] x is 0, 1, or 2;
[0248] n is 1, 2, 3, or 4;
[0249] each Rₐ and R_{b} is, independently, H, a protecting group, hydroxyl, C₁-C₁₂ alkyl, substituted C₁-C₁₂ alkyl, C₂-C₁₂ alkenyl, substituted C₂-C₁₂ alkenyl, C₂-C₁₂ alkynyl, substituted C₂-C₁₂ alkynyl, C₅-C₂₀ aryl, substituted C₅-C₂₀ aryl, heterocycle radical, substituted heterocycle radical, heteroaryl, substituted heteroaryl, C₅-C₇ alicyclic radical, substituted C₅-C₇ alicyclic radical, halogen, OJ₁, NJ₁J₂, SJ₁, N₃, COOJ₁, acyl (C(═O)—H), substituted acyl, CN, sulfonyl (S(═O)₂-J₁), or sulfoxyl (S(═O)-J₁); and each J₁ and J₂ is, independently, H, C₁-C₁₂ alkyl, substituted C₁-C₁₂ alkyl, C₂-C₁₂ alkenyl, substituted C₂-C₁₂ alkenyl, C₂-C₁₂ alkynyl, substituted C₂-C₁₂ alkynyl, C₅-C₂₀ aryl, substituted C₅-C₂₀ aryl, acyl (C(═O)—H), substituted acyl, a heterocycle radical, a substituted heterocycle radical, C₁-C₁₂ aminoalkyl, substituted C₁-C₁₂ aminoalkyl, or a protecting group.

[0250] Additional bicyclic sugar moieties are known in the art, see, for example: Freier et al., Nucleic Acids Research, 1997, 25(22), 4429-4443, Albaek et al., J. Org. Chem., 2006, 71, 7731-7740, Singh et al., Chem. Commun., 1998, 4, 455-456; Koshkin et al., Tetrahedron, 1998, 54, 3607-3630; Wahlestedt et al., Proc. Natl. Acad. Sci. U.S.A., 2000, 97, 5633-5638; Kumar et al., Bioorg. Med. Chem. Lett., 1998, 8, 2219-2222; Singh et al., J. Org. Chem., 1998, 63, 10035-10039; Srivastava et al., J. Am. Chem. Soc., 2007, 129, 8362-8379; Elayadi et al., Curr. Opinion Invens. Drugs, 2001, 2, 558-561; Braasch et al., Chem. Biol., 2001, 8, 1-7; Orum et al., Curr. Opinion Mol. Ther., 2001, 3, 239-243; Wengel et al., U.S. Pat. No. 7,053,207, Imanishi et al., U.S. Pat. No. 6,268,490, Imanishi et al. U.S. Pat. No. 6,770,748, Imanishi et al., U.S. RE44,779; Wengel et al., U.S. Pat. No. 6,794,499, Wengel et al., U.S. Pat. No. 6,670,461; Wengel et al., U.S. Pat. No. 7,034,133, Wengel et al., U.S. Pat. No. 8,080,644; Wengel et al., U.S. Pat. No. 8,034,909; Wengel et al., U.S. Pat. No. 8,153,365; Wengel et al., U.S. Pat. No. 7,572,582; and Ramasamy et al., U.S. Pat. No. 6,525,191, Torsten et al., WO 2004/106356, Wengel et al., WO 1999/014226; Seth et al., WO 2007/134181; Seth et al., U.S. Pat. No. 7,547,684; Seth et al., U.S. Pat. No. 7,666,854; Seth et al., U.S. Pat. No. 8,088,746; Seth et al., U.S. Pat. No. 7,750,131; Seth et al., U.S. Pat. No. 8,030,467; Seth et al., U.S. Pat. No. 8,268,980; Seth et al., U.S. Pat. No. 8,546,556; Seth et al., U.S. Pat. No. 8,530,640; Migawa et al., U.S. Pat. No. 9,012,421; Seth et al., U.S. Pat. No. 8,501,805; Allerson et al., US2008/0039618; and Migawa et al., US2015/0191727.

[0251] In certain embodiments, bicyclic sugar moieties and nucleosides incorporating such bicyclic sugar moieties are further defined by isomeric configuration. For example, an LNA nucleoside (described herein) may be in the α-L configuration or in the β-D configuration.

[chemical structure]

α-L-methyleneoxy (4′-CH₂—O—2′) or α-L-LNA bicyclic nucleosides have been incorporated into oligonucleotides that showed antisense activity (Frieden et al., Nucleic Acids Research, 2003, 21, 6365-6372). Herein, general descriptions of bicyclic nucleosides include both isomeric configurations. When the positions of specific bicyclic nucleosides (e.g., LNA or cEt) are identified in exemplified embodiments herein, they are in the β-D configuration, unless otherwise specified.

[0252] In certain embodiments, modified sugar moieties comprise one or more non-bridging sugar substituent and one or more bridging sugar substituent (e.g., 5′-substituted and 4′-2′ bridged sugars).

[0253] In certain embodiments, modified sugar moieties are sugar surrogates. In certain such embodiments, the oxygen atom of the sugar moiety is replaced, e.g., with a sulfur, carbon or nitrogen atom. In certain such embodiments, such modified sugar moieties also comprise bridging and/or non-bridging substituents as described herein. For example, certain sugar surrogates comprise a 4′-sulfur atom and a substitution at the 2′-position (see, e.g., Bhat et al., U.S. Pat. No. 7,875,733 and Bhat et al., U.S. Pat. No. 7,939,677) and/or the 5′ position.

[0254] In certain embodiments, sugar surrogates comprise rings having other than 5 atoms. For example, in certain embodiments, a sugar surrogate comprises a six-membered tetrahydropyran (“THP”). Such tetrahydropyrans may be further modified or substituted. Nucleosides comprising such modified tetrahydropyrans include but are not limited to hexitol nucleic acid (“HNA”), anitol nucleic acid (“ANA”), manitol nucleic acid (“MNA”) (see e.g., Leumann, CJ. Bioorg. & Med. Chem. 2002, 10, 841-854), fluoro HNA:

[chemical structure]

(“F-HNA”, see e.g., Swayze et al., U.S. Pat. No. 8,088,904; Swayze et al., U.S. Pat. No. 8,440,803; and Swayze et al., U.S. Pat. No. 9,005,906, F-HNA can also be referred to as a F-THP or 3′-fluoro tetrahydropyran), and nucleosides comprising additional modified THP compounds having the formula:

[chemical structure]

wherein, independently, for each of said modified THP nucleoside:
[0255] Bx is a nucleobase moiety;
[0256] T₃ and T₄ are each, independently, an internucleoside linking group linking the modified THP nucleoside to the remainder of an oligonucleotide or one of T₃ and T₄ is an internucleoside linking group linking the modified THP nucleoside to the remainder of an oligonucleotide and the other of T₃ and T₄ is H, a hydroxyl protecting group, a linked conjugate group, or a 5′ or 3′-terminal group; q₁, q₂, q₃, q₄, q₅, q₆ and q₇ are each, independently, H, C₁-C₆ alkyl, substituted C₁-C₆ alkyl, C₂-C₆ alkenyl, substituted C₂-C₆ alkenyl, C₂-C₆ alkynyl, or substituted C₂-C₆ alkynyl; and each of R₁ and R₂ is independently selected from among: hydrogen, halogen, substituted or unsubstituted alkoxy, NJ₁J₂, SJ₁, N₃, OC(═X)J₁, OC(═X)NJ₁J₂, NJ₃C(═X)NJ₁J₂, and CN, wherein X is O, S or NJ₁, and each J₁, J₂, and J₃ is, independently, H or C₁-C₆ alkyl.

[0257] In certain embodiments, modified THP nucleosides are provided wherein q₁, q₂, q₃, q₄, q₅, q₆ and q₇ are each H. In certain embodiments, at least one of q₁, q₂, q₃, q₄, q₅, q₆ and q₇ is other than H. In certain embodiments, at least one of q₁, q₂, q₃, q₄, q₅, q₆ and q₇ is methyl. In certain embodiments, modified THP nucleosides are provided wherein one of R₁ and R₂ is F. In certain embodiments, R₁ is F and R₂ is H, in certain embodiments, R₁ is methoxy and R₂ is H, and in certain embodiments, R₁ is methoxyethoxy and R₂ is H.

[0258] In certain embodiments, sugar surrogates comprise rings having more than 5 atoms and more than one heteroatom. For example, nucleosides comprising morpholino sugar moieties and their use in oligonucleotides have been reported (see, e.g., Braasch et al., Biochemistry, 2002, 41, 4503-4510 and Summerton et al., U.S. Pat. No. 5,698,685; Summerton et al., U.S. Pat. No. 5,166,315; Summerton et al., U.S. Pat. No. 5,185,444; and Summerton et al., U.S. Pat. No. 5,034,506). As used here, the term “morpholino” means a sugar surrogate having the following structure:

[chemical structure]

In certain embodiments, morpholinos may be modified, for example by adding or altering various substituent groups from the above morpholino structure. Such sugar surrogates are referred to herein as “modified morpholinos.”

[0259] In certain embodiments, sugar surrogates comprise acyclic moieties. Examples of nucleosides and oligonucleotides comprising such acyclic sugar surrogates include but are not limited to: peptide nucleic acid (“PNA”), acyclic butyl nucleic acid (see, e.g., Kumar et al., Org. Biomol. Chem., 2013, 11, 5853-5865), and nucleosides and oligonucleotides described in Manoharan et al., US2013/130378.

[0260] Many other bicyclic and tricyclic sugar and sugar surrogate ring systems are known in the art that can be used in modified nucleosides.

[0261] 2. Modified Nucleobases

[0262] Nucleobase (or base) modifications or substitutions are structurally distinguishable from, yet functionally interchangeable with, naturally occurring or synthetic unmodified nucleobases. Both natural and modified nucleobases are capable of participating in hydrogen bonding. Such nucleobase modifications can impart nuclease stability, binding affinity or some other beneficial biological property to antisense compounds.

[0263] In certain embodiments, compounds described herein comprise modified oligonucleotides. In certain embodiments, modified oligonucleotides comprise one or more nucleoside comprising an unmodified nucleobase. In certain embodiments, modified oligonucleotides comprise one or more nucleoside comprising a modified nucleobase. In certain embodiments, modified oligonucleotides comprise one or more nucleoside that does not comprise a nucleobase, referred to as an abasic nucleoside.

[0264] In certain embodiments, modified nucleobases are selected from: 5-substituted pyrimidines, 6-azapyrimi¬dines, alkyl or alkynyl substituted pyrimidines, alkyl substituted purines, and N-2, N-6 and O-6 substituted purines. In certain embodiments, modified nucleobases are selected from: 2-aminopropyladenine, 5-hydroxymethyl cytosine, 5-methylcytosine, xanthine, hypoxanthine, 2-aminoadenine, 6-N-methylguanine, 6-N-methyladenine, 2-propyladenine, 2-thiouracil, 2-thiothymine and 2-thiocytosine, 5-propynyl (C═C—CH₃) uracil, 5-propynylcytosine, 6-azouracil, 6-azocytosine, 6-azothymine, 5-ribosyluracil (pseudouracil), 4-thiouracil, 8-halo, 8-amino, 8-thiol, 8-thioalkyl, 8-hydroxyl, 8-aza and other 8-substituted purines, 5-halo, particularly 5-bromo, 5-trifluoromethyl, 5-halouracil, and 5-halocytosine, 7-methylguanine, 7-methyladenine, 2-F-adenine, 2-aminoadenine, 7-deazaguanine, 7-deazaadenine, 3-deazaguanine, 3-deazaadenine, 6-N-benzoyladenine, 2-N-isobutyrylguanine, 4-N-benzoylcytosine, 4-N-benzoyluracil, 5-methyl 4-N-benzoylcytosine, 5-methyl 4-N-benzoyluracil, universal bases, hydrophobic bases, promiscuous bases, size-expanded bases, and fluorinated bases. Further modified nucleobases include tricyclic pyrimidines, such as 1,3-diazaphenoxazine-2-one, 1,3-diazaphenothiazine-2-one and 9-(2-aminoethoxy)-1,3-diazaphenoxazine-2-one (G-clamp). Modified nucleobases may also include those in which the purine or pyrimidine base is replaced with other heterocycles, for example 7-deaza-adenine, 7-deazaguanosine, 2-aminopyridine and 2-pyridone. Further nucleobases include those disclosed in Merigan et al., U.S. Pat. No. 3,687,808, those disclosed in The Concise Encyclopedia Of Polymer Science And Engineering, Kroschwitz, J. I., Ed., John Wiley & Sons, 1990, 858-859; Englisch et al., Angewandte Chemie, International Edition, 1991, 30, 613; Sanghvi, Y. S., Chapter 15, Antisense Research and Applications, Crooke, S. T. and Lebleu, B., Eds., CRC Press, 1993, 273-288; and those disclosed in Chapters 6 and 15, Antisense Drug Technology, Crooke S. T., Ed., CRC Press, 2008, 163-166 and 442-443.

[0265] Publications that teach the preparation of certain of the above noted modified nucleobases as well as other modified nucleobases include without limitation, Manoharan et al., US2003/0158403, Manoharan et al., US2003/0175906; Dinh et al., U.S. Pat. No. 4,845,205; Spielvogel et al., U.S. Pat. No. 5,130,302; Rogers et al., U.S. Pat. No. 5,134,066; Bischofberger et al., U.S. Pat. No. 5,175,273; Urdea et al., U.S. Pat. No. 5,367,066; Benner et al., U.S. Pat. No. 5,432,272; Matteucci et al., U.S. Pat. No. 5,434,257; Gmeiner et al., U.S. Pat. No. 5,457,187; Cook et al., U.S. Pat. No. 5,459,255; Froehler et al., U.S. Pat. No. 5,484,908; Matteucci et al., U.S. Pat. No. 5,502,177; Hawkins et al., U.S. Pat. No. 5,525,711; Haralambidis et al., U.S. Pat. No. 5,552,540; Cook et al., U.S. Pat. No. 5,587,469; Froehler et al., U.S. Pat. No. 5,594,121; Switzer et al., U.S. Pat. No. 5,596,091; Cook et al., U.S. Pat. No. 5,614,617; Froehler et al., U.S. Pat. No. 5,645,985; Cook et al., U.S. Pat. No. 5,681,941; Cook et al., U.S. Pat. No. 5,811,534; Cook et al., U.S. Pat. No. 5,750,692; Cook et al., U.S. Pat. No. 5,948,903; Cook et al., U.S. Pat. No. 5,587,470; Cook et al., U.S. Pat. No. 5,457,191; Matteucci et al., U.S. Pat. No. 5,763,588; Froehler et al., U.S. Pat. No. 5,830,653; Cook et al., U.S. Pat. No. 5,808,027; Cook et al., U.S. Pat. No. 6,166,199; and Matteucci et al., U.S. Pat. No. 6,005,096.

[0266] In certain embodiments, compounds targeted to a APOL1 nucleic acid comprise one or more modified nucleobases. In certain embodiments, the modified nucleobase is 5-methylcytosine. In certain embodiments, each cytosine is a 5-methylcytosine.

[0267] Modified Internucleoside Linkages

[0268] The naturally occurring internucleoside linkage of RNA and DNA is a 3′ to 5′ phosphodiester linkage In certain embodiments, compounds described herein having one or more modified, i.e. non-naturally occurring, internucleoside linkages are often selected over compounds having naturally occurring internucleoside linkages because of desirable properties such as, for example, enhanced cellular uptake, enhanced affinity for target nucleic acids, and increased stability in the presence of nucleases.

[0269] Representative internucleoside linkages having a chiral center include but are not limited to alkylphosphonates and phosphorothioates. Modified oligonucleotides comprising internucleoside linkages having a chiral center can be prepared as populations of modified oligonucleotides comprising stereorandom internucleoside linkages, or as populations of modified oligonucleotides comprising phosphorothioate linkages in particular stereochemical configurations. In certain embodiments, populations of modified oligonucleotides comprise phosphorothioate internucleoside linkages wherein all of the phosphorothioate internucleoside linkages are stereorandom. Such modified oligonucleotides can be generated using synthetic methods that result in random selection of the stereochemical configuration of each phosphorothioate linkage. Nonetheless, as is well understood by those of skill in the art, each individual phosphorothioate of each individual oligonucleotide molecule has a defined stereoconfiguration. In certain embodiments, populations of modified oligonucleotides are enriched for modified oligonucleotides comprising one or more particular phosphorothioate internucleoside linkages in a particular, independently selected stereochemical configuration. In certain embodiments, the particular configuration of the particular phosphorothioate linkage is present in at least 65% of the molecules in the population. In certain embodiments, the particular configuration of the particular phosphorothioate linkage is present in at least 70% of the molecules in the population. In certain embodiments, the particular configuration of the particular phosphorothioate linkage is present in at least 80% of the molecules in the population. In certain embodiments, the particular configuration of the particular phosphorothioate linkage is present in at least 90% of the molecules in the population. In certain embodiments, the particular configuration of the particular phosphorothioate linkage is present in at least 99% of the molecules in the population. Such chirally enriched populations of modified oligonucleotides can be generated using synthetic methods known in the art, e.g., methods described in Oka et al., JACS 125, 8307 (2003), Wan et al. Nuc. Acid. Res. 42, 13456 (2014), and WO 2017/015555. In certain embodiments, a population of modified oligonucleotides is enriched for modified oligonucleotides having at least one indicated phosphorothioate in the (Sp) configuration. In certain embodiments, a population of modified oligonucleotides is enriched for modified oligonucleotides having at least one phosphorothioate in the (Rp) configuration. In certain embodiments, modified oligonucleotides comprising (Rp) and/or (Sp) phosphorothioates comprise one or more of the following formulas, respectively, wherein “B” indicates a nucleobase:

[chemical structure]

Unless otherwise indicated, chiral internucleoside linkages of modified oligonucleotides described herein can be stereorandom or in a particular stereochemical configuration.

[0270] In certain embodiments, compounds targeted to an APOL1 nucleic acid comprise one or more modified internucleoside linkages. In certain embodiments, the modified internucleoside linkages are phosphorothioate linkages. In certain embodiments, each internucleoside linkage of an antisense compound is a phosphorothioate internucleoside linkage.

[0271] In certain embodiments, compounds described herein comprise oligonucleotides. Oligonucleotides having modified internucleoside linkages include internucleoside linkages that retain a phosphorus atom as well as internucleoside linkages that do not have a phosphorus atom. Representative phosphorus containing internucleoside linkages include, but are not limited to, phosphodiesters, phosphotriesters, methylphosphonates, phosphoramidate, and phosphorothioates. Methods of preparation of phosphorous-containing and non-phosphorous-containing linkages are well known.

[0272] In certain embodiments, nucleosides of modified oligonucleotides may be linked together using any internucleoside linkage. The two main classes of internucleoside linking groups are defined by the presence or absence of a phosphorus atom. Representative phosphorus-containing internucleoside linkages include but are not limited to phosphates, which contain a phosphodiester bond (“P═O”) (also referred to as unmodified or naturally occurring linkages), phosphotriesters, methylphosphonates, phosphoramidates, and phosphorothioates (“P═S”), and phosphorodithioates (“HS—P═S”). Representative non-phosphorus containing internucleoside linking groups include but are not limited to methylenemethylimino (—CH₂—N(CH₃)—O—CH₂—), thiodiester, thionocarbamate (—O—C(═O)(NH)—S—); siloxane (—O—SiH2-O—); and N,N′-dimethylhydrazine (—CH₂—N(CH₃)—N(CH₃)—). Modified internucleoside linkages, compared to naturally occurring phosphate linkages, can be used to alter, typically increase, nuclease resistance of the oligonucleotide. In certain embodiments, internucleoside linkages having a chiral atom can be prepared as a racemic mixture, or as separate enantiomers. Representative chiral internucleoside linkages include but are not limited to alkylphosphonates and phosphorothioates. Methods of preparation of₌phosphorous-containing and non-phosphorous-containing internucleoside linkages are well known to those skilled in the art.

[0273] Neutral internucleoside linkages include, without limitation, phosphotriesters, methylphosphonates, MMI (3′-CH2-N(CH3)-O-5′), amide-3 (3′-CH2-C(═O)—N(H)-5′), amide-4 (3′-CH2-N(H)—C(═O)-5′), formacetal (3′-O-CH2-O-5′), methoxypropyl, andthioformacetal (3′-S-CH2-O-5′). Further neutral internucleoside linkages include nonionic linkages comprising siloxane (dialkylsiloxane), carboxylate ester, carboxamide, sulfide, sulfonate ester and amides (See for example: Carbohydrate Modifications in Antisense Research; Y. S. Sanghvi and P. D. Cook, Eds., ACS Symposium Series 580; Chapters 3 and 4, 40-65). Further neutral internucleoside linkages include nonionic linkages comprising mixed N, O, S and CH₂ component parts.

[0274] In certain embodiments, oligonucleotides comprise modified internucleoside linkages arranged along the oligonucleotide or region thereof in a defined pattern or modified internucleoside linkage motif. In certain embodiments, internucleoside linkages are arranged in a gapped motif. In such embodiments, the internucleoside linkages in each of two wing regions are different from the internucleoside linkages in the gap region. In certain embodiments the internucleoside linkages in the wings are phosphodiester and the internucleoside linkages in the gap are phosphorothioate. The nucleoside motif is independently selected, so such oligonucleotides having a gapped internucleoside linkage motif may or may not have a gapped nucleoside motif and if it does have a gapped nucleoside motif, the wing and gap lengths may or may not be the same.

[0275] In certain embodiments, oligonucleotides comprise a region having an alternating internucleoside linkage motif. In certain embodiments, oligonucleotides comprise a region of uniformly modified internucleoside linkages. In certain such embodiments, the oligonucleotide comprises a region that is uniformly linked by phosphorothioate internucleoside linkages. In certain embodiments, the oligonucleotide is uniformly linked by phosphorothioate. In certain embodiments, each internucleoside linkage of the oligonucleotide is selected from phosphodiester and phosphorothioate. In certain embodiments, each internucleoside linkage of the oligonucleotide is selected from phosphodiester and phosphorothioate and at least one internucleoside linkage is phosphorothioate.

[0276] In certain embodiments, the oligonucleotide comprises at least 6 phosphorothioate internucleoside linkages. In certain embodiments, the oligonucleotide comprises at least 8 phosphorothioate internucleoside linkages. In certain embodiments, the oligonucleotide comprises at least 10 phosphorothioate internucleoside linkages. In certain embodiments, the oligonucleotide comprises at least one block of at least 6 consecutive phosphorothioate internucleoside linkages. In certain embodiments, the oligonucleotide comprises at least one block of at least 8 consecutive phosphorothioate internucleoside linkages. In certain embodiments, the oligonucleotide comprises at least one block of at least 10 consecutive phosphorothioate internucleoside linkages. In certain embodiments, the oligonucleotide comprises at least block of at least one 12 consecutive phosphorothioate internucleoside linkages. In certain such embodiments, at least one such block is located at the 3′ end of the oligonucleotide. In certain such embodiments, at least one such block is located within 3 nucleosides of the 3′ end of the oligonucleotide.

[0277] In certain embodiments, oligonucleotides comprise one or more methylphosponate linkages. In certain embodiments, oligonucleotides having a gapmer nucleoside motif comprise a linkage motif comprising all phosphorothioate linkages except for one or two methylphosponate linkages. In certain embodiments, one methylphosponate linkage is in the central gap of an oligonucleotide having a gapmer nucleoside motif.

[0278] In certain embodiments, it is desirable to arrange the number of phosphorothioate internucleoside linkages and phosphodiester internucleoside linkages to maintain nuclease resistance. In certain embodiments, it is desirable to arrange the number and position of phosphorothioate internucleoside linkages and the number and position of phosphodiester internucleoside linkages to maintain nuclease resistance. In certain embodiments, the number of phosphorothioate internucleoside linkages may be decreased and the number of phosphodiester internucleoside linkages may be increased. In certain embodiments, the number of phosphorothioate internucleoside linkages may be decreased and the number of phosphodiester internucleoside linkages may be increased while still maintaining nuclease resistance. In certain embodiments it is desirable to decrease the number of phosphorothioate internucleoside linkages while retaining nuclease resistance. In certain embodiments it is desirable to increase the number of phosphodiester internucleoside linkages while retaining nuclease resistance.

[0279] 3. Certain Motifs

[0280] In certain embodiments, compounds described herein comprise oligonucleotides. Oligonucleotides can have a motif, e.g. a pattern of unmodified and/or modified sugar moieties, nucleobases, and/or internucleoside linkages. In certain embodiments, modified oligonucleotides comprise one or more modified nucleoside comprising a modified sugar. In certain embodiments, modified oligonucleotides comprise one or more modified nucleosides comprising a modified nucleobase. In certain embodiments, modified oligonucleotides comprise one or more modified internucleoside linkage. In such embodiments, the modified, unmodified, and differently modified sugar moieties, nucleobases, and/or internucleoside linkages of a modified oligonucleotide define a pattern or motif. In certain embodiments, the patterns of sugar moieties, nucleobases, and internucleoside linkages are each independent of one another. Thus, a modified oligonucleotide may be described by its sugar motif, nucleobase motif and/or internucleoside linkage motif (as used herein, nucleobase motif describes the modifications to the nucleobases independent of the sequence of nucleobases).

[0281] a. Certain Sugar Motifs

[0282] In certain embodiments, compounds described herein comprise oligonucleotides. In certain embodiments, oligonucleotides comprise one or more type of modified sugar and/or unmodified sugar moiety arranged along the oligonucleotide or region thereof in a defined pattern or sugar motif. In certain instances, such sugar motifs include but are not limited to any of the sugar modifications discussed herein.

[0283] In certain embodiments, modified oligonucleotides comprise or consist of a region having a gapmer motif, which comprises two external regions or “wings” and a central or internal region or “gap.” The three regions of a gapmer motif (the 5′-wing, the gap, and the 3′-wing) form a contiguous sequence of nucleosides wherein at least some of the sugar moieties of the nucleosides of each of the wings differ from at least some of the sugar moieties of the nucleosides of the gap. Specifically, at least the sugar moieties of the nucleosides of each wing that are closest to the gap (the 3′-most nucleoside of the 5′-wing and the 5′-most nucleoside of the 3′-wing) differ from the sugar moiety of the neighboring gap nucleosides, thus defining the boundary between the wings and the gap (i.e., the wing/gap junction). In certain embodiments, the sugar moieties within the gap are the same as one another. In certain embodiments, the gap includes one or more nucleoside having a sugar moiety that differs from the sugar moiety of one or more other nucleosides of the gap. In certain embodiments, the sugar motifs of the two wings are the same as one another (symmetric gapmer). In certain embodiments, the sugar motif of the 5′-wing differs from the sugar motif of the 3′-wing (asymmetric gapmer).

[0284] In certain embodiments, the wings of a gapmer comprise 1-5 nucleosides. In certain embodiments, the wings of a gapmer comprise 2-5 nucleosides. In certain embodiments, the wings of a gapmer comprise 3-5 nucleosides. In certain embodiments, the nucleosides of a gapmer are all modified nucleosides.

[0285] In certain embodiments, the gap of a gapmer comprises 7-12 nucleosides. In certain embodiments, the gap of a gapmer comprises 7-10 nucleosides. In certain embodiments, the gap of a gapmer comprises 8-10 nucleosides. In certain embodiments, the gap of a gapmer comprises 10 nucleosides. In certain embodiment, each nucleoside of the gap of a gapmer is an unmodified 2′-deoxy nucleoside.

[0286] In certain embodiments, the gapmer is a deoxy gapmer. In such embodiments, the nucleosides on the gap side of each wing/gap junction are unmodified 2′-deoxy nucleosides and the nucleosides on the wing sides of each wing/gap junction are modified nucleosides. In certain such embodiments, each nucleoside of the gap is an unmodified 2′-deoxy nucleoside. In certain such embodiments, each nucleoside of each wing is a modified nucleoside.

[0287] In certain embodiments, a modified oligonucleotide has a fully modified sugar motif wherein each nucleoside of the modified oligonucleotide comprises a modified sugar moiety. In certain embodiments, modified oligonucleotides comprise or consist of a region having a fully modified sugar motif wherein each nucleoside of the region comprises a modified sugar moiety. In certain embodiments, modified oligonucleotides comprise or consist of a region having a fully modified sugar motif, wherein each nucleoside within the fully modified region comprises the same modified sugar moiety, referred to herein as a uniformly modified sugar motif. In certain embodiments, a fully modified oligonucleotide is a uniformly modified oligonucleotide. In certain embodiments, each nucleoside of a uniformly modified comprises the same 2′-modification.

[0288] b. Certain Nucleobase Motifs

[0289] In certain embodiments, compounds described herein comprise oligonucleotides. In certain embodiments, oligonucleotides comprise modified and/or unmodified nucleobases arranged along the oligonucleotide or region thereof in a defined pattern or motif. In certain embodiments, each nucleobase is modified. In certain embodiments, none of the nucleobases are modified. In certain embodiments, each purine or each pyrimidine is modified. In certain embodiments, each adenine is modified. In certain embodiments, each guanine is modified. In certain embodiments, each thymine is modified. In certain embodiments, each uracil is modified. In certain embodiments, each cytosine is modified. In certain embodiments, some or all of the cytosine nucleobases in a modified oligonucleotide are 5-methylcytosines.

[0290] In certain embodiments, modified oligonucleotides comprise a block of modified nucleobases. In certain such embodiments, the block is at the 3′-end of the oligonucleotide. In certain embodiments the block is within 3 nucleosides of the 3′-end of the oligonucleotide. In certain embodiments, the block is at the 5′-end of the oligonucleotide. In certain embodiments the block is within 3 nucleosides of the 5′-end of the oligonucleotide.

[0291] In certain embodiments, oligonucleotides having a gapmer motif comprise a nucleoside comprising a modified nucleobase. In certain such embodiments, one nucleoside comprising a modified nucleobase is in the central gap of an oligonucleotide having a gapmer motif. In certain such embodiments, the sugar moiety of said nucleoside is a 2′-deoxyribosyl moiety. In certain embodiments, the modified nucleobase is selected from: a 2-thiopyrimidine and a 5-propynepyrimidine.

[0292] c. Certain Internucleoside Linkage Motifs

[0293] In certain embodiments, compounds described herein comprise oligonucleotides. In certain embodiments, oligonucleotides comprise modified and/or unmodified intemucleoside linkages arranged along the oligonucleotide or region thereof in a defined pattern or motif. In certain embodiments, essentially each intemucleoside linking group is a phosphate intemucleoside linkage (P═O). In certain embodiments, each internucleoside linking group of a modified oligonucleotide is a phosphorothioate (P═S). In certain embodiments, each internucleoside linking group of a modified oligonucleotide is independently selected from a phosphorothioate and phosphate internucleoside linkage. In certain embodiments, the sugar motif of a modified oligonucleotide is a gapmer and the internucleoside linkages within the gap are all modified.

[0294] In certain such embodiments, some or all of the internucleoside linkages in the wings are unmodified phosphate linkages. In certain embodiments, the terminal internucleoside linkages are modified. In certain embodiments, the sugar motif of a modified oligonucleotide is a gapmer, and the internucleoside linkage motif comprises at least one phosphodiester internucleoside linkage in at least one wing, wherein the at least one phosphodiester linkage is not a terminal internucleoside linkage, and the remaining internucleoside linkages are phosphorothioate internucleoside linkages. In certain such embodiments, all of the phosphorothioate linkages are stereorandom. In certain embodiments, all of the phosphorothioate linkages in the wings are (Sp) phosphorothioates, and the gap comprises at least one Sp, Sp, Rp motif. In certain embodiments, populations of modified oligonucleotides are enriched for modified oligonucleotides comprising such internucleoside linkage motifs.

[0295] 4. Certain Modified Oligonucleotides

[0296] In certain embodiments, compounds described herein comprise modified oligonucleotides. In certain embodiments, the above modifications (sugar, nucleobase, internucleoside linkage) are incorporated into a modified oligonucleotide. In certain embodiments, modified oligonucleotides are characterized by their modification, motifs, and overall lengths. In certain embodiments, such parameters are each independent of one another. Thus, unless otherwise indicated, each internucleoside linkage of an oligonucleotide having a gapmer sugar motif may be modified or unmodified and may or may not follow the gapmer modification pattern of the sugar modifications. For example, the internucleoside linkages within the wing regions of a sugar gapmer may be the same or different from one another and may be the same or different from the internucleoside linkages of the gap region of the sugar motif. Likewise, such gapmer oligonucleotides may comprise one or more modified nucleobase independent of the gapmer pattern of the sugar modifications. Furthermore, in certain instances, an oligonucleotide is described by an overall length or range and by lengths or length ranges of two or more regions (e.g., a regions of nucleosides having specified sugar modifications), in such circumstances it may be possible to select numbers for each range that result in an oligonucleotide having an overall length falling outside the specified range. In such circumstances, both elements must be satisfied. For example, in certain embodiments, a modified oligonucleotide consists of 15-20 linked nucleosides and has a sugar motif consisting of three regions, A, B, and C, wherein region A consists of 2-6 linked nucleosides having a specified sugar motif, region B consists of 6-10 linked nucleosides having a specified sugar motif, and region C consists of 2-6 linked nucleosides having a specified sugar motif Such embodiments do not include modified oligonucleotides where A and C each consist of 6 linked nucleosides and B consists of 10 linked nucleosides (even though those numbers of nucleosides are permitted within the requirements for A, B, and C) because the overall length of such oligonucleotide is 22, which exceeds the upper limit of the overall length of the modified oligonucleotide (20). Herein, if a description of an oligonucleotide is silent with respect to one or more parameter, such parameter is not limited. Thus, a modified oligonucleotide described only as having a gapmer sugar motif without further description may have any length, internucleoside linkage motif, and nucleobase motif Unless otherwise indicated, all modifications are independent of nucleobase sequence.

### Certain Conjugated Compounds

[0297] In certain embodiments, the compounds described herein comprise or consist of an oligonucleotide (modified or unmodified) and optionally one or more conjugate groups and/or terminal groups. Conjugate groups consist of one or more conjugate moiety and a conjugate linker which links the conjugate moiety to the oligonucleotide. Conjugate groups may be attached to either or both ends of an oligonucleotide and/or at any internal position. In certain embodiments, conjugate groups are attached to the 2′-position of a nucleoside of a modified oligonucleotide. In certain embodiments, conjugate groups that are attached to either or both ends of an oligonucleotide are terminal groups. In certain such embodiments, conjugate groups or terminal groups are attached at the 3′ and/or 5′-end of oligonucleotides. In certain such embodiments, conjugate groups (or terminal groups) are attached at the 3′-end of oligonucleotides. In certain embodiments, conjugate groups are attached near the 3′-end of oligonucleotides. In certain embodiments, conjugate groups (or terminal groups) are attached at the 5′-end of oligonucleotides. In certain embodiments, conjugate groups are attached near the 5′-end of oligonucleotides.

[0298] In certain embodiments, the oligonucleotide is modified. In certain embodiments, the oligonucleotide of a compound has a nucleobase sequence that is complementary to a target nucleic acid. In certain embodiments, oligonucleotides are complementary to a messenger RNA (mRNA). In certain embodiments, oligonucleotides are complementary to a sense transcript.

[0299] Examples of terminal groups include but are not limited to conjugate groups, capping groups, phosphate moieties, protecting groups, modified or unmodified nucleosides, and two or more nucleosides that are independently modified or unmodified.

[0300] A. Certain Conjugate Groups

[0301] In certain embodiments, oligonucleotides are covalently attached to one or more conjugate groups. In certain embodiments, conjugate groups modify one or more properties of the attached oligonucleotide, including but not limited to pharmacodynamics, pharmacokinetics, stability, binding, absorption, tissue distribution, cellular distribution, cellular uptake, charge and clearance In certain embodiments, conjugate groups impart a new property on the attached oligonucleotide, e.g., fluorophores or reporter groups that enable detection of the oligonucleotide.

[0302] Certain conjugate groups and conjugate moieties have been described previously, for example: cholesterol moiety (Letsinger et al., Proc. Natl. Acad. Sci. USA, 1989, 86, 6553-6556), cholic acid (Manoharan et al., Bioorg. Med. Chem. Lett., 1994, 4, 1053-1060), a thioether, e.g., hexyl-S-tritylthiol (Manoharan et al., Ann. N.Y. Acad. Sci., 1992, 660, 306-309; Manoharan et al., Bioorg. Med. Chem. Lett., 1993, 3, 2765-2770), a thiocholesterol (Oberhauser et al., Nucl. Acids Res., 1992, 20, 533-538), an aliphatic chain, e.g., do-decan-diol or undecyl residues (Saison-Behmoaras et al., EMBO J., 1991, 10, 1111-1118; Kabanov et al., FEBS Lett., 1990, 259, 327-330; Svinarchuk et al., Biochimie, 1993, 75, 49-54), a phospholipid, e.g., di-hexadecyl-rac-glycerol or triethyl-ammonium 1,2-di-O-hexadecyl-rac-glycero-3-H-phosphonate (Manoharan et al., Tetrahedron Lett., 1995, 36, 3651-3654; Shea et al., Nucl. Acids Res., 1990, 18, 3777-3783), a polyamine or a polyethylene glycol chain (Manoharan et al., Nucleosides & Nucleotides, 1995, 14, 969-973), or adamantane acetic, a palmityl moiety (Mishra et al., Biochim. Biophys. Acta, 1995, 1264, 229-237), an octadecylamine or hexylamino-carbonyl-oxycholesterol moiety (Crooke et al., J. Pharmacol. Exp. Ther., 1996, i, 923-937), a tocopherol group (Nishina et al., Molecular Therapy Nucleic Acids, 2015, 4, e220; doi:10.1038/mtna.2014.72 and Nishina et al., Molecular Therapy, 2008, 16, 734-740), or a GalNAc cluster (e.g., WO2014/179620).

[0303] 1. Conjugate Moieties

[0304] Conjugate moieties include, without limitation, intercalators, reporter molecules, polyamines, polyamides, peptides, carbohydrates (e.g., GalNAc), vitamin moieties, polyethylene glycols, thioethers, polyethers, cholesterols, thiocholesterols, cholic acid moieties, folate, lipids, phospholipids, biotin, phenazine, phenanthridine, anthraquinone, adamantane, acridine, fluoresceins, rhodamines, coumarins, fluorophores, and dyes.

[0305] In certain embodiments, a conjugate moiety comprises an active drug substance, for example, aspirin, warfarin, phenylbutazone, ibuprofen, suprofen, fen-bufen, ketoprofen, (S)-(+)-pranoprofen, carprofen, dansylsarcosine, 2,3,5-triiodobenzoic acid, fingolimod, flufenamic acid, folinic acid, a benzothiadiazide, chlorothiazide, a diazepine, indo-methicin, a barbiturate, a cephalosporin, a sulfa drug, an antidiabetic, an antibacterial or an antibiotic.

[0306] 2. Conjugate Linkers

[0307] Conjugate moieties are attached to oligonucleotides through conjugate linkers. In certain compounds, a conjugate group is a single chemical bond (i.e. conjugate moiety is attached to an oligonucleotide via a conjugate linker through a single bond). In certain embodiments, the conjugate linker comprises a chain structure, such as a hydrocarbyl chain, or an oligomer of repeating units such as ethylene glycol, nucleosides, or amino acid units.

[0308] In certain embodiments, a conjugate linker comprises one or more groups selected from alkyl, amino, oxo, amide, disulfide, polyethylene glycol, ether, thioether, and hydroxylamino. In certain such embodiments, the conjugate linker comprises groups selected from alkyl, amino, oxo, amide and ether groups. In certain embodiments, the conjugate linker comprises groups selected from alkyl and amide groups. In certain embodiments, the conjugate linker comprises groups selected from alkyl and ether groups. In certain embodiments, the conjugate linker comprises at least one phosphorus moiety. In certain embodiments, the conjugate linker comprises at least one phosphate group. In certain embodiments, the conjugate linker includes at least one neutral linking group.

[0309] In certain embodiments, conjugate linkers, including the conjugate linkers described above, are bifunctional linking moieties, e.g., those known in the art to be useful for attaching conjugate groups to parent compounds, such as the oligonucleotides provided herein. In general, a bifunctional linking moiety comprises at least two functional groups. One of the functional groups is selected to bind to a particular site on a compound and the other is selected to bind to a conjugate group. Examples of functional groups used in a bifunctional linking moiety include but are not limited to electrophiles for reacting with nucleophilic groups and nucleophiles for reacting with electrophilic groups. In certain embodiments, bifunctional linking moieties comprise one or more groups selected from amino, hydroxyl, carboxylic acid, thiol, alkyl, alkenyl, and alkynyl.

[0310] Examples of conjugate linkers include but are not limited to pyrrolidine, 8-amino-3,6-dioxaoctanoic acid (ADO), succinimidyl 4-(N-maleimidomethyl) cyclohexane-1-carboxylate (SMCC) and 6-aminohexanoic acid (AHEX or AHA). Other conjugate linkers include but are not limited to substituted or unsubstituted C₁-C₁₀ alkyl, substituted or unsubstituted C₂-C₁₀ alkenyl or substituted or unsubstituted C₂-C₁₀ alkynyl, wherein a nonlimiting list of preferred substituent groups includes hydroxyl, amino, alkoxy, carboxy, benzyl, phenyl, nitro, thiol, thioalkoxy, halogen, alkyl, aryl, alkenyl and alkynyl.

[0311] In certain embodiments, conjugate linkers comprise 1-10 linker-nucleosides. In certain embodiments, such linker-nucleosides are modified nucleosides. In certain embodiments such linker-nucleosides comprise a modified sugar moiety. In certain embodiments, linker-nucleosides are unmodified. In certain embodiments, linker-nucleosides comprise an optionally protected heterocyclic base selected from a purine, substituted purine, pyrimidine or substituted pyrimidine. In certain embodiments, a cleavable moiety is a nucleoside selected from uracil, thymine, cytosine, 4-N-benzoylcytosine, 5-methylcytosine, 4-N-benzoyl-5-methylcytosine, adenine, 6-N-benzoyladenine, guanine and 2-N-isobutyrylguanine. It is typically desirable for linker-nucleosides to be cleaved from the compound after it reaches a target tissue. Accordingly, linker-nucleosides are typically linked to one another and to the remainder of the compound through cleavable bonds. In certain embodiments, such cleavable bonds are phosphodiester bonds.

[0312] Herein, linker-nucleosides are not considered to be part of the oligonucleotide. Accordingly, in embodiments in which a compound comprises an oligonucleotide consisting of a specified number or range of linked nucleosides and/or a specified percent complementarity to a reference nucleic acid and the compound also comprises a conjugate group comprising a conjugate linker comprising linker-nucleosides, those linker-nucleosides are not counted toward the length of the oligonucleotide and are not used in determining the percent complementarity of the oligonucleotide for the reference nucleic acid. For example, a compound may comprise (1) a modified oligonucleotide consisting of 8-30 nucleosides and (2) a conjugate group comprising 1-10 linker-nucleosides that are contiguous with the nucleosides of the modified oligonucleotide. The total number of contiguous linked nucleosides in such a compound is more than 30. Alternatively, an compound may comprise a modified oligonucleotide consisting of 8-30 nucleosides and no conjugate group. The total number of contiguous linked nucleosides in such a compound is no more than 30. Unless otherwise indicated conjugate linkers comprise no more than 10 linker-nucleosides. In certain embodiments, conjugate linkers comprise no more than 5 linker-nucleosides. In certain embodiments, conjugate linkers comprise no more than 3 linker-nucleosides. In certain embodiments, conjugate linkers comprise no more than 2 linker-nucleosides. In certain embodiments, conjugate linkers comprise no more than 1 linker-nucleoside.

[0313] In certain embodiments, it is desirable for a conjugate group to be cleaved from the oligonucleotide. For example, in certain circumstances compounds comprising a particular conjugate moiety are better taken up by a particular cell type, but once the compound has been taken up, it is desirable that the conjugate group be cleaved to release the unconjugated or parent oligonucleotide. Thus, certain conjugate may comprise one or more cleavable moieties, typically within the conjugate linker. In certain embodiments, a cleavable moiety is a cleavable bond. In certain embodiments, a cleavable moiety is a group of atoms comprising at least one cleavable bond. In certain embodiments, a cleavable moiety comprises a group of atoms having one, two, three, four, or more than four cleavable bonds. In certain embodiments, a cleavable moiety is selectively cleaved inside a cell or subcellular compartment, such as a lysosome. In certain embodiments, a cleavable moiety is selectively cleaved by endogenous enzymes, such as nucleases.

[0314] In certain embodiments, a cleavable bond is selected from among: an amide, an ester, an ether, one or both esters of a phosphodiester, a phosphate ester, a carbamate, or a disulfide. In certain embodiments, a cleavable bond is one or both of the esters of a phosphodiester. In certain embodiments, a cleavable moiety comprises a phosphate or phosphodiester. In certain embodiments, the cleavable moiety is a phosphate linkage between an oligonucleotide and a conjugate moiety or conjugate group.

[0315] In certain embodiments, a cleavable moiety comprises or consists of one or more linker-nucleosides. In certain such embodiments, one or more linker-nucleosides are linked to one another and/or to the remainder of the compound through cleavable bonds. In certain embodiments, such cleavable bonds are unmodified phosphodiester bonds. In certain embodiments, a cleavable moiety is 2′-deoxy nucleoside that is attached to either the 3′ or 5-terminal nucleoside of an oligonucleotide by a phosphate internucleoside linkage and covalently attached to the remainder of the conjugate linker or conjugate moiety by a phosphate or phosphorothioate linkage. In certain such embodiments, the cleavable moiety is 2′-deoxyadenosine.

### Compositions and Methods for Formulating Pharmaceutical Compositions

[0316] Compounds described herein may be admixed with pharmaceutically acceptable active or inert substances for the preparation of pharmaceutical compositions or formulations. Compositions and methods for the formulation of pharmaceutical compositions are dependent upon a number of criteria, including, but not limited to, route of administration, extent of disease, or dose to be administered.

[0317] Certain embodiments provide pharmaceutical compositions comprising one or more compounds or a salt thereof. In certain embodiments, the compounds are antisense compounds or oligomeric compounds. In certain embodiments, the compounds comprise or consist of a modified oligonucleotide. In certain such embodiments, the pharmaceutical composition comprises a suitable pharmaceutically acceptable diluent or carrier. In certain embodiments, a pharmaceutical composition comprises a sterile saline solution and one or more compound. In certain embodiments, such pharmaceutical composition consists of a sterile saline solution and one or more compound. In certain embodiments, the sterile saline is pharmaceutical grade saline. In certain embodiments, a pharmaceutical composition comprises one or more compound and sterile water. In certain embodiments, a pharmaceutical composition consists of one compound and sterile water. In certain embodiments, the sterile water is pharmaceutical grade water. In certain embodiments, a pharmaceutical composition comprises one or more compound and phosphate-buffered saline (PBS). In certain embodiments, a pharmaceutical composition consists of one or more compound and sterile PBS. In certain embodiments, the sterile PBS is pharmaceutical grade PBS. Compositions and methods for the formulation of pharmaceutical compositions are dependent upon a number of criteria, including, but not limited to, route of administration, extent of disease, or dose to be administered.

[0318] A compound described herein targeted to APOL1 nucleic acid can be utilized in pharmaceutical compositions by combining the compound with a suitable pharmaceutically acceptable diluent or carrier. In certain embodiments, a pharmaceutically acceptable diluent is water, such as sterile water suitable for injection. Accordingly, in one embodiment, employed in the methods described herein is a pharmaceutical composition comprising a compound targeted to APOL1 nucleic acid and a pharmaceutically acceptable diluent. In certain embodiments, the pharmaceutically acceptable diluent is water. In certain embodiments, the compound comprises or consists of a modified oligonucleotide provided herein.

[0319] Pharmaceutical compositions comprising compounds provided herein encompass any pharmaceutically acceptable salts, esters, or salts of such esters, or any other oligonucleotide which, upon administration to an animal, including a human, is capable of providing (directly or indirectly) the biologically active metabolite or residue thereof. In certain embodiments, the compounds are antisense compounds or oligomeric compounds. In certain embodiments, the compound comprises or consists of a modified oligonucleotide. Accordingly, for example, the disclosure is also drawn to pharmaceutically acceptable salts of compounds, prodrugs, pharmaceutically acceptable salts of such prodrugs, and other bioequivalents. Suitable pharmaceutically acceptable salts include, but are not limited to, sodium and potassium salts.

[0320] A prodrug can include the incorporation of additional nucleosides at one or both ends of a compound which are cleaved by endogenous nucleases within the body, to form the active compound. In certain embodiments, the compounds or compositions further comprise a pharmaceutically acceptable carrier or diluent.

### Certain Selected Compounds

[0321] Approximately 1930 newly designed compounds and a few previously disclosed compounds of various lengths, chemistries, and motifs were tested for their effect on human APOL1 mRNA in vitro in several cell types (Example 1). Of 1930 compounds tested for potency at a single dose in vitro, 373 selected compounds were tested for dose dependent inhibition in A431 cells (Example 2). Of the 373 compounds tested by dose response assays, 86 oligonucleotides were selected for in vivo efficacy and tolerability in rodents.

[0322] In the in vivo rodent tolerability models, body weights and organ weights, liver function markers (such as alanine transaminase, aspartate transaminase and bilirubin), hematology markers (such as HCT, white blood cell counts, platelet counts, RBC counts, MCH, and MCHC), and kidney function markers (such as BUN and creatinine) were measured. In the hAPOL1 transgenic mouse model, in vivo reduction of hAPOL1 mRNA was measured.

[0323] ION #s 793406, 904763, 905469, 905505, 905634, 905665, 972190, and 972163 were tested for activity, pharmacokinetic profile and tolerability in cynomolgus monkeys (Example 9). Treatment with some of the compounds caused reduction of APOL1 mRNA expression in liver tissue. Specifically, treatment with ION 904763 and ION 972190, which were cross-reactive with the APOL1 cynomolgus monkey gene sequence, caused significant reduction of APOL1 mRNA expression in liver tissue, compared to the PBS control. It was noted that ION 972190 caused the highest reduction of APOL1 mRNA expression compared to the PBS control. Treatment with the compounds was well tolerated in the monkeys, in particular, treatment with ION 972190.

[0324] Accordingly, provided herein are compounds with any one or more of the improved properties. In certain embodiments, the compounds as described herein are potent and tolerable.

### EXAMPLES

[0325] The Examples below describe the screening process to identify lead compounds targeted to APOL1. ION 793406, 904763, 905469, 905505, 905634, 905665, 972190, and 972163 resulted in high potency and tolerability, for instance. ION 972190 exhibited high potency and tolerability.

### Non-Limiting Disclosure and Incorporation by Reference

[0326] Although the sequence listing accompanying this filing identifies each sequence as either “RNA” or “DNA” as required, in reality, those sequences may be modified with any combination of chemical modifications. One of skill in the art will readily appreciate that such designation as “RNA” or “DNA” to describe modified oligonucleotides is, in certain instances, arbitrary. For example, an oligonucleotide comprising a nucleoside comprising a 2′-OH sugar moiety and a thymine base could be described as a DNA having a modified sugar (2′-OH for the natural 2′-H of DNA) or as an RNA having a modified base (thymine (methylated uracil) for natural uracil of RNA).

[0327] Accordingly, nucleic acid sequences provided herein, including, but not limited to those in the sequence listing, are intended to encompass nucleic acids containing any combination of natural or modified RNA and/or DNA, including, but not limited to such nucleic acids having modified nucleobases. By way of further example and without limitation, an oligonucleotide having the nucleobase sequence “ATCGATCG” encompasses any oligonucleotides having such nucleobase sequence, whether modified or unmodified, including, but not limited to, such compounds comprising RNA bases, such as those having sequence “AUCGAUCG” and those having some DNA bases and some RNA bases such as “AUCGATCG” and compounds having other modified nucleobases, such as “AT^{m}CGAUCG,” wherein ^{m}C indicates a cytosine base comprising a methyl group at the 5-position.

[0328] Certain compounds described herein (e.g. modified oligonucleotides) have one or more asymmetric centers and thus give rise to enantiomers, diastereomers, and other stereoisomeric configurations that may be defined, in terms of absolute stereochemistry, as (R) or (S), as a or R, such as for sugar anomers, or as (D) or (L), such as for amino acids, etc. Compounds provided herein that are drawn or described as having certain stereoisomeric configurations include only the indicated compounds. Compounds provided herein that are drawn or described with undefined stereochemistry include all such possible isomers, including their stereorandom and optically pure forms. Likewise, all tautomeric forms of the compounds provided herein are included unless otherwise indicated. Unless otherwise indicated, oligomeric compounds and modified oligonucleotides described herein are intended to include corresponding salt forms.

[0329] Compounds described herein include variations in which one or more atoms are replaced with a non-radioactive isotope or radioactive isotope of the indicated element. For example, compounds herein that comprise hydrogen atoms encompass all possible deuterium substitutions for each of the ¹H hydrogen atoms. Isotopic substitutions encompassed by the compounds herein include but are not limited to: ²H or ³H in place of ¹H, ¹³C or ¹⁴C in place of ¹²C, ¹⁵N in place of ¹⁴N, ¹⁷O or ¹⁸O in place of ¹⁶O, and ³³S, ³⁴S, ³⁵S, or ³⁶S in place of ³²S.

[0330] While certain compounds, compositions and methods described herein have been described with specificity in accordance with certain embodiments, the following examples serve only to illustrate the compounds described herein and are not intended to limit the same. Each of the references recited in the present application is incorporated herein by reference in its entirety.

### Example 1: Antisense Inhibition of Human APOL1 in A431 Cells

[0331] Antisense oligonucleotides with various chemistry motifs were designed targeting an APOL1 nucleic acid and were tested for their effects on APOL1 mRNA in vitro.

### 3-10-3 cEt Gapmers

[0332] The newly designed chimeric antisense oligonucleotides in the Tables below were designed as 3-10-3 cEt gapmers. The gapmers are 16 nucleosides in length, wherein the central gap segment comprises of ten 2′-deoxynucleosides and is flanked by wing segments on the 5′ direction and the 3′ direction comprising three nucleosides each. Each nucleoside in the 5′ wing segment and each nucleoside in the 3′ wing segment has a cEt modification. The internucleoside linkages throughout each gapmer are phosphorothioate (P═S) linkages. All cytosine residues throughout each gapmer are 5-methylcytosines.

[0333] “Start site” indicates the 5′-most nucleoside to which the gapmer is targeted in the human gene sequence. “Stop site” indicates the 3′-most nucleoside to which the gapmer is targeted human gene sequence. Each gapmer listed in the Tables below is targeted to either the human APOL1 mRNA, designated herein as SEQ ID NO: 1 (GENBANK Accession No. NM_003661.3) or the human APOL1 genomic sequence, designated herein as SEQ ID NO: 2 (GENBANK Accession No. NT_011520.9 truncated from nucleotides 15986452 to 16001905). ‘n/a’ indicates that the antisense oligonucleotide does not target that particular gene sequence with 100% complementarity.

[0334] The antisense oligonucleotides were tested in a series of experiments that had similar culture conditions. The results for each experiment are presented in separate tables shown below. Cultured A431 cells at a density of 10,000 cells per well were transfected by free uptake with 4,000 nM antisense oligonucleotide. After a treatment period of approximately 24 hours, RNA was isolated from the cells and APOL1 mRNA levels were measured by quantitative real-time PCR. Human primer probe set RTS35962 (forward sequence GCTACTCCTGCTGACTGATAATG, designated herein as SEQ ID NO: 10; reverse sequence AAGGTTGTCCAGAGCTTTACG, designated herein as SEQ ID NO: 11; probe sequence TGCCCAGGAATGAGGCAGATGAG, designated herein as SEQ ID NO: 12) was used to measure mRNA levels. APOL1 mRNA levels were adjusted according to total RNA content, as measured by RIBOGREEN®. Results are presented as percent inhibition of APOL1, relative to untreated control cells. Oligonucleotides listed in Table 28 were screened in later experiments.

TABLE 1
Inhibition of APOL1 mRNA by 3-10-3 cEt
gapmers targeting SEQ ID NO: 1 and 2

| | SEQ | SEQ | SEQ | SEQ | | | |
|---|---|---|---|---|---|---|---|
| | ID: 1 | ID: 1 | ID: 2 | ID: 2 | | % | SEQ |
| Compound | Start | Stop | Start | Stop | | inhi- | ID |
| Number | Site | Site | Site | Site | Sequence | bition | NO |
| 793406 | N/A | N/A | 8306 | 8321 | GTTCAAAAGCAGCATT | 83 | 13 |
| 903425 | 23 | 38 | 516 | 531 | AAGATATACCGAGGAA | 24 | 14 |
| 903457 | 124 | 139 | 617 | 632 | TCCCCTGGCAGAGACT | 54 | 15 |
| 903489 | 250 | 265 | 4543 | 4558 | TCGCTCCAGCTTCCTC | 55 | 16 |
| 903521 | 302 | 317 | 4777 | 4792 | TTACTTTGAGGATCTC | 48 | 17 |
| 903617 | 559 | 574 | 12650 | 12665 | ACTGCTGGCCTTTATC | 76 | 18 |
| 903649 | 628 | 643 | 12719 | 12734 | GGAGCCTTCTTATGTT | 8 | 19 |
| 903681 | 669 | 684 | 12760 | 12775 | GGTGCCTTTGTGGACC | 0 | 20 |
| 903713 | 740 | 755 | 12831 | 12846 | AGACCCATGCCGACGA | 30 | 21 |
| 903745 | 810 | 825 | 12901 | 12916 | AGCGGCTGTGATTCCC | 46 | 22 |
| 903777 | 849 | 864 | 12940 | 12955 | CTTTCCGTAGTCCATG | 17 | 23 |
| 903809 | 930 | 945 | 13021 | 13036 | ACCCAAAAACTCCCTC | 82 | 24 |
| 903841 | 1007 | 1022 | 13098 | 13113 | GCACGGATGTCCTTCC | 57 | 25 |
| 903873 | 1083 | 1098 | 13174 | 13189 | GATTGGCTCAGTGACC | 59 | 26 |
| 903905 | 1126 | 1141 | 13217 | 13232 | TGGGTTCATTAACCCT | 3 | 27 |
| 903937 | 1211 | 1226 | 13302 | 13317 | ACGAGGTAGACTACAT | 76 | 28 |
| 903969 | 1344 | 1359 | 13435 | 13450 | TTCTTGGTCCGCCTGC | 84 | 29 |
| 904001 | 1719 | 1734 | 13810 | 13825 | AATGTTTGCATTTGGG | 98 | 30 |
| 904033 | 1798 | 1813 | 13889 | 13904 | GTGCTCAGCTATGGAA | 90 | 31 |
| 904065 | 1925 | 1940 | 14016 | 14031 | TAGTCTAAAGTAAACT | 26 | 32 |
| 904097 | 2283 | 2298 | 14374 | 14389 | GCTGGTTCCTTCAAGC | 25 | 33 |
| 904129 | 2412 | 2427 | 14503 | 14518 | CATTCTTCGGAGGACA | 78 | 34 |
| 904161 | 2510 | 2525 | 14601 | 14616 | TCAGGAAGCCGCTGCC | 58 | 35 |
| 904193 | 2599 | 2614 | 14690 | 14705 | ACCTGCCCTTCAGTGT | 52 | 36 |
| 904225 | 2723 | 2738 | 14814 | 14829 | CTGTTTACTTACCGGG | 83 | 37 |
| 904257 | 2804 | 2819 | 14895 | 14910 | TCAATCCTGGGCGGCG | 85 | 38 |
| 904321 | N/A | N/A | 1373 | 1388 | CATGATTGCAAAGCTG | 89 | 39 |
| 904353 | N/A | N/A | 836 | 851 | GCTTTGTGAACCCATC | 58 | 40 |
| 904385 | N/A | N/A | 2479 | 2494 | CAAGCCCAGTCCAATT | 23 | 41 |
| 904417 | N/A | N/A | 2988 | 3003 | GATGTTTGTCTTCTGG | 88 | 42 |
| 904449 | N/A | N/A | 4339 | 4354 | GCCAGTGTGTATTGCA | 40 | 43 |
| 904481 | N/A | N/A | 4711 | 4726 | ACAAATTGTGGGATCA | 0 | 44 |
| 904513 | N/A | N/A | 5057 | 5072 | CTAGGTGCCAGGGTAG | 47 | 45 |
| 904545 | N/A | N/A | 5114 | 5129 | CCCCCCCCCCGCTGAT | 9 | 46 |
| 904577 | N/A | N/A | 5292 | 5307 | GGGCCACTCAGAGCAA | 0 | 47 |
| 904609 | N/A | N/A | 5357 | 5372 | GTGGCAAAGGACAGAC | 72 | 48 |
| 904641 | N/A | N/A | 5489 | 5504 | CCCTATTGTGTGGCAG | 66 | 49 |
| 904673 | N/A | N/A | 5681 | 5696 | TTTTTCTTTGACCGGG | 74 | 50 |
| 904705 | N/A | N/A | 5765 | 5780 | CGAAGCCTCCTCCAGT | 65 | 51 |
| 904737 | N/A | N/A | 5806 | 5821 | CACCCGATAAACCTTG | 67 | 52 |
| 904769 | N/A | N/A | 5861 | 5876 | AGGCAGTTTTGTAAGT | 76 | 53 |
| 904801 | N/A | N/A | 5932 | 5947 | ATTCGGAGACCTCCCT | 5 | 54 |
| 904833 | N/A | N/A | 5964 | 5979 | CCTGGGCAAGGCTAAG | 35 | 55 |
| 904865 | N/A | N/A | 6137 | 6152 | TTACTCCACACCTTAA | 39 | 56 |
| 904897 | N/A | N/A | 6205 | 6220 | TTTGGTACAAAACTGC | 71 | 57 |
| 904929 | N/A | N/A | 6260 | 6275 | TGTCTCACTAAACCCC | 69 | 58 |
| 904961 | N/A | N/A | 6328 | 6343 | GACCAGTGAGATCCAA | 85 | 59 |
| 904993 | N/A | N/A | 6401 | 6416 | ACCACCTGTAGGGACA | 50 | 60 |
| 905025 | N/A | N/A | 6541 | 6556 | GGGTACTTCTGTTAGA | 82 | 61 |
| 905057 | N/A | N/A | 6599 | 6614 | CAGCTGTAACCCCCTG | 44 | 62 |
| 905089 | N/A | N/A | 6647 | 6662 | CAGCCCTGAAACATTC | 13 | 63 |
| 905121 | N/A | N/A | 6793 | 6808 | GCGATTGTCTTGTTTT | 93 | 64 |
| 905153 | N/A | N/A | 6878 | 6893 | GCCGTGGCAACTCTGT | 0 | 65 |
| 905185 | N/A | N/A | 6994 | 7009 | GGGTCGGCTGAGTGCT | 61 | 66 |
| 905217 | N/A | N/A | 7156 | 7171 | ACCTCCATGTTGCCTC | 42 | 67 |
| 905249 | N/A | N/A | 7243 | 7258 | GCTGGTCTTGGGCACT | 34 | 68 |
| 905281 | N/A | N/A | 7338 | 7353 | CTTATAGCTTACCTGT | 27 | 69 |
| 905313 | N/A | N/A | 7474 | 7489 | GAGTCACCGCCCAAAA | 59 | 70 |
| 905345 | N/A | N/A | 7842 | 7857 | TTGCCGTGCACACACA | 19 | 71 |
| 905377 | N/A | N/A | 7937 | 7952 | GTTTGCAGGGATCTGG | 86 | 72 |
| 905409 | N/A | N/A | 8000 | 8015 | CAAAGAACTCAAGTCA | 85 | 73 |
| 905441 | N/A | N/A | 8087 | 8102 | ACTGCTCCCTGTAATC | 38 | 74 |
| 905473 | N/A | N/A | 8174 | 8189 | TGTGTTTAGGCATTCA | 87 | 75 |
| 905505 | N/A | N/A | 8321 | 8336 | GTTATGAAATTATTGG | 96 | 76 |
| 905537 | N/A | N/A | 8385 | 8400 | ATGCCTGTTGGGTCAA | 64 | 77 |
| 905569 | N/A | N/A | 8455 | 8470 | GCACCAACATGAAGTG | 71 | 78 |
| 905601 | N/A | N/A | 8625 | 8640 | ACCCTTTTGGCACCTT | 94 | 79 |
| 905633 | N/A | N/A | 8743 | 8758 | TTCTATTAGAGGGCTA | 94 | 80 |
| 905665 | N/A | N/A | 8829 | 8844 | GCTTTAAACTCAGGTG | 93 | 81 |
| 905697 | N/A | N/A | 8890 | 8905 | GTTTTATGGAGTCATT | 95 | 82 |
| 905729 | N/A | N/A | 8959 | 8974 | GTGCATAACAGCCATT | 19 | 83 |

TABLE 2
Inhibition of APOL1 mRNA by 3-10-3 cEt
gapmers targeting SEQ ID NO: 1 and 2

| | SEQ | SEQ | SEQ | SEQ | | | |
|---|---|---|---|---|---|---|---|
| | ID: 1 | ID: 1 | ID: 2 | ID: 2 | | % | SEQ |
| Compound | Start | Stop | Start | Stop | | inhi- | ID |
| Number | Site | Site | Site | Site | Sequence | bition | NO |
| 793406 | N/A | N/A | 8306 | 8321 | GTTCAAAAGCAGCATT | 85 | 13 |
| 903424 | 22 | 37 | 515 | 530 | AGATATACCGAGGAAT | 3 | 84 |
| 903456 | 79 | 94 | 572 | 587 | GGATCCCACCTCCAGT | 9 | 85 |
| 903488 | 227 | 242 | 4520 | 4535 | ACTCCCACACCAAGGA | 27 | 86 |
| 903520 | 301 | 316 | 4776 | 4791 | TACTTTGAGGATCTCC | 65 | 87 |
| 903616 | 558 | 573 | 12649 | 12664 | CTGCTGGCCTTTATCG | 0 | 88 |
| 903648 | 627 | 642 | 12718 | 12733 | GAGCCTTCTTATGTTA | 27 | 89 |
| 903680 | 668 | 683 | 12759 | 12774 | GTGCCTTTGTGGACCT | 24 | 90 |
| 903712 | 739 | 754 | 12830 | 12845 | GACCCATGCCGACGAG | 46 | 91 |
| 903744 | 809 | 824 | 12900 | 12915 | GCGGCTGTGATTCCCA | 0 | 92 |
| 903776 | 848 | 863 | 12939 | 12954 | TTTCCGTAGTCCATGG | 20 | 93 |
| 903808 | 914 | 929 | 13005 | 13020 | ACCTCCTTCAATTTGT | 61 | 94 |
| 903840 | 1006 | 1021 | 13097 | 13112 | CACGGATGTCCTTCCC | 69 | 95 |
| 903872 | 1082 | 1097 | 13173 | 13188 | ATTGGCTCAGTGACCC | 88 | 96 |
| 903904 | 1125 | 1140 | 13216 | 13231 | GGGTTCATTAACCCTC | 22 | 97 |
| 903936 | 1210 | 1225 | 13301 | 13316 | CGAGGTAGACTACATC | 63 | 98 |
| 903968 | 1343 | 1358 | 13434 | 13449 | TCTTGGTCCGCCTGCA | 66 | 99 |
| 904000 | 1717 | 1732 | 13808 | 13823 | TGTTTGCATTTGGGTC | 99 | 100 |
| 904032 | 1797 | 1812 | 13888 | 13903 | TGCTCAGCTATGGAAA | 77 | 101 |
| 904064 | 1924 | 1939 | 14015 | 14030 | AGTCTAAAGTAAACTG | 18 | 102 |
| 904096 | 2282 | 2297 | 14373 | 14388 | CTGGTTCCTTCAAGCC | 77 | 103 |
| 904128 | 2411 | 2426 | 14502 | 14517 | ATTCTTCGGAGGACAT | 71 | 104 |
| 904160 | 2508 | 2523 | 14599 | 14614 | AGGAAGCCGCTGCCTG | 0 | 105 |
| 904192 | 2596 | 2611 | 14687 | 14702 | TGCCCTTCAGTGTTCA | 47 | 106 |
| 904224 | 2722 | 2737 | 14813 | 14828 | TGTTTACTTACCGGGT | 91 | 107 |
| 904256 | 2803 | 2818 | 14894 | 14909 | CAATCCTGGGCGGCGA | 79 | 108 |
| 904320 | N/A | N/A | 1372 | 1387 | ATGATTGCAAAGCTGG | 75 | 109 |
| 904352 | N/A | N/A | 828 | 843 | AACCCATCTGAGCTGT | 34 | 110 |
| 904384 | N/A | N/A | 2476 | 2491 | GCCCAGTCCAATTGTG | 14 | 111 |
| 904416 | N/A | N/A | 2970 | 2985 | ACTCCATGCAGCAAGG | 71 | 112 |
| 904448 | N/A | N/A | 4322 | 4337 | GTCTGCGATGTGCAGA | 21 | 113 |
| 904480 | N/A | N/A | 4705 | 4720 | TGTGGGATCAAATGTG | 0 | 114 |
| 904512 | N/A | N/A | 5056 | 5071 | TAGGTGCCAGGGTAGG | 68 | 115 |
| 904544 | N/A | N/A | 5113 | 5128 | CCCCCCCCCGCTGATT | 16 | 116 |
| 904576 | N/A | N/A | 5291 | 5306 | GGCCACTCAGAGCAAA | 0 | 117 |
| 904608 | N/A | N/A | 5355 | 5370 | GGCAAAGGACAGACCG | 9 | 118 |
| 904640 | N/A | N/A | 5466 | 5481 | CCAGGCCAGGTAGCCG | 21 | 119 |
| 904672 | N/A | N/A | 5666 | 5681 | GGGTATTTTAGATGAC | 76 | 120 |
| 904704 | N/A | N/A | 5764 | 5779 | GAAGCCTCCTCCAGTT | 68 | 121 |
| 904736 | N/A | N/A | 5805 | 5820 | ACCCGATAAACCTTGT | 73 | 122 |
| 904768 | N/A | N/A | 5860 | 5875 | GGCAGTTTTGTAAGTG | 81 | 123 |
| 904800 | N/A | N/A | 5931 | 5946 | TTCGGAGACCTCCCTA | 33 | 124 |
| 904832 | N/A | N/A | 5963 | 5978 | CTGGGCAAGGCTAAGT | 1 | 125 |
| 904864 | N/A | N/A | 6136 | 6151 | TACTCCACACCTTAAT | 18 | 126 |
| 904896 | N/A | N/A | 6204 | 6219 | TTGGTACAAAACTGCA | 68 | 127 |
| 904928 | N/A | N/A | 6259 | 6274 | GTCTCACTAAACCCCA | 71 | 128 |
| 904960 | N/A | N/A | 6327 | 6342 | ACCAGTGAGATCCAAC | 87 | 129 |
| 904992 | N/A | N/A | 6377 | 6392 | GGATGGGCCCACAGGA | 39 | 130 |
| 905024 | N/A | N/A | 6540 | 6555 | GGTACTTCTGTTAGAT | 37 | 131 |
| 905056 | N/A | N/A | 6598 | 6613 | AGCTGTAACCCCCTGA | 54 | 132 |
| 905088 | N/A | N/A | 6646 | 6661 | AGCCCTGAAACATTCC | 39 | 133 |
| 905120 | N/A | N/A | 6792 | 6807 | CGATTGTCTTGTTTTT | 96 | 134 |
| 905152 | N/A | N/A | 6877 | 6892 | CCGTGGCAACTCTGTA | 22 | 135 |
| 905184 | N/A | N/A | 6992 | 7007 | GTCGGCTGAGTGCTCT | 35 | 136 |
| 905216 | N/A | N/A | 7152 | 7167 | CCATGTTGCCTCTGTC | 62 | 137 |
| 905248 | N/A | N/A | 7242 | 7257 | CTGGTCTTGGGCACTC | 25 | 138 |
| 905280 | N/A | N/A | 7336 | 7351 | TATAGCTTACCTGTGG | 59 | 139 |
| 905312 | N/A | N/A | 7472 | 7487 | GTCACCGCCCAAAACC | 51 | 140 |
| 905344 | N/A | N/A | 7840 | 7855 | GCCGTGCACACACAAG | 29 | 141 |
| 905376 | N/A | N/A | 7929 | 7944 | GGATCTGGGAATTATG | 65 | 142 |
| 905408 | N/A | N/A | 7999 | 8014 | AAAGAACTCAAGTCAG | 91 | 143 |
| 905440 | N/A | N/A | 8085 | 8100 | TGCTCCCTGTAATCAC | 55 | 144 |
| 905472 | N/A | N/A | 8173 | 8188 | GTGTTTAGGCATTCAG | 72 | 145 |
| 905504 | N/A | N/A | 8318 | 8333 | ATGAAATTATTGGTTC | 82 | 146 |
| 905536 | N/A | N/A | 8384 | 8399 | TGCCTGTTGGGTCAAA | 43 | 147 |
| 905568 | N/A | N/A | 8454 | 8469 | CACCAACATGAAGTGA | 0 | 148 |
| 905600 | N/A | N/A | 8624 | 8639 | CCCTTTTGGCACCTTC | 95 | 149 |
| 905632 | N/A | N/A | 8742 | 8757 | TCTATTAGAGGGCTAG | 57 | 150 |
| 905664 | N/A | N/A | 8828 | 8843 | CTTTAAACTCAGGTGA | 62 | 151 |
| 905696 | N/A | N/A | 8887 | 8902 | TTATGGAGTCATTAGT | 79 | 152 |
| 905728 | N/A | N/A | 8958 | 8973 | TGCATAACAGCCATTG | 0 | 153 |

TABLE 3
Inhibition of APOL1 mRNA by 3-10-3 cEt gapmers
targeting SEQ ID NO: 1 and 2

| | SEQ | SEQ | SEQ | SEQ | | | |
|---|---|---|---|---|---|---|---|
| | ID: 1 | ID: 1 | ID: 2 | ID: 2 | | % | |
| Compound | Start | Stop | Start | Stop | | inhi- | SEQ |
| Number | Site | Site | Site | Site | Sequence | bition | ID NO |
| 793406 | N/A | N/A | 8306 | 8321 | GTTCAAAAGCAGCATT | 81 | 13 |
| 903428 | 26 | 41 | 519 | 534 | CCCAAGATATACCGAG | 24 | 154 |
| 903460 | 130 | 145 | 623 | 638 | GAATCTTCCCCTGGCA | 55 | 155 |
| 903492 | 255 | 270 | N/A | N/A | CACCCTCGCTCCAGCT | 44 | 156 |
| 903524 | 322 | 337 | 4797 | 4812 | CAGCCCAGTCACCGAG | 14 | 157 |
| 903620 | 562 | 577 | 12653 | 12668 | TGTACTGCTGGCCTTT | 68 | 158 |
| 903652 | 631 | 646 | 12722 | 12737 | CACGGAGCCTTCTTAT | 31 | 159 |
| 903684 | 672 | 687 | 12763 | 12778 | GGTGGTGCCTTTGTGG | 0 | 160 |
| 903716 | 743 | 758 | 12834 | 12849 | GCCAGACCCATGCCGA | 39 | 161 |
| 903748 | 813 | 828 | 12904 | 12919 | CAAAGCGGCTGTGATT | 21 | 162 |
| 903780 | 852 | 867 | 12943 | 12958 | CTTCTTTCCGTAGTCC | 32 | 163 |
| 903812 | 936 | 951 | 13027 | 13042 | GTTCTCACCCAAAAAC | 20 | 164 |
| 903844 | 1011 | 1026 | 13102 | 13117 | GAGGGCACGGATGTCC | 39 | 165 |
| 903876 | 1086 | 1101 | 13177 | 13192 | TGAGATTGGCTCAGTG | 64 | 166 |
| 903908 | 1129 | 1144 | 13220 | 13235 | TGCTGGGTTCATTAAC | 6 | 167 |
| 903940 | 1231 | 1246 | 13322 | 13337 | GTAAGTGCTTTGATTC | 93 | 168 |
| 903972 | 1347 | 1362 | 13438 | 13453 | CAGTTCTTGGTCCGCC | 79 | 169 |
| 904004 | 1743 | 1758 | 13834 | 13849 | TCACCCTCTTTATCCC | 76 | 170 |
| 904036 | 1801 | 1816 | 13892 | 13907 | GCTGTGCTCAGCTATG | 35 | 171 |
| 904068 | 1929 | 1944 | 14020 | 14035 | TCTTTAGTCTAAAGTA | 0 | 172 |
| 904100 | 2336 | 2351 | 14427 | 14442 | TAACTCTTGGGCTTTC | 73 | 173 |
| 904132 | 2415 | 2430 | 14506 | 14521 | CTTCATTCTTCGGAGG | 34 | 174 |
| 904164 | 2513 | 2528 | 14604 | 14619 | TCATCAGGAAGCCGCT | 73 | 175 |
| 904196 | 2613 | 2628 | 14704 | 14719 | GGCCATGGCCCACCAC | 0 | 176 |
| 904228 | 2766 | 2781 | 14857 | 14872 | AGCTTCCTCCCAATGC | 24 | 177 |
| 904260 | 2807 | 2822 | 14898 | 14913 | AGGTCAATCCTGGGCG | 58 | 178 |
| 904324 | N/A | N/A | 1376 | 1391 | TCTCATGATTGCAAAG | 69 | 179 |
| 904356 | N/A | N/A | 871 | 886 | GTCTCAGCAGTCAAAA | 62 | 180 |
| 904388 | N/A | N/A | 2518 | 2533 | TTGGTTCCTAGAAGAA | 36 | 181 |
| 904420 | N/A | N/A | 3414 | 3429 | ACTGAGGGTATATGAA | 82 | 182 |
| 904452 | N/A | N/A | 4361 | 4376 | GTGTGATAACTAGCTG | 86 | 183 |
| 904484 | N/A | N/A | 4738 | 4753 | TTTTGTTGCACCCTTG | 83 | 184 |
| 904516 | N/A | N/A | 5065 | 5080 | GTCATTTGCTAGGTGC | 90 | 185 |
| 904548 | N/A | N/A | 5173 | 5188 | TGGTCAACCTCCTCTC | 0 | 186 |
| 904580 | N/A | N/A | 5305 | 5320 | ATACATTCCCACAGGG | 22 | 187 |
| 904612 | N/A | N/A | 5393 | 5408 | AGGGAGGTAAGGAGCG | 26 | 188 |
| 904644 | N/A | N/A | 5492 | 5507 | AGGCCCTATTGTGTGG | 0 | 189 |
| 904676 | N/A | N/A | 5694 | 5709 | ATTGGGCCTCAGATTT | 57 | 190 |
| 904708 | N/A | N/A | 5768 | 5783 | GCACGAAGCCTCCTCC | 60 | 191 |
| 904740 | N/A | N/A | 5809 | 5824 | ATTCACCCGATAAACC | 47 | 192 |
| 904772 | N/A | N/A | 5870 | 5885 | AACCCAAACAGGCAGT | 69 | 193 |
| 904804 | N/A | N/A | 5935 | 5950 | TGTATTCGGAGACCTC | 47 | 194 |
| 904836 | N/A | N/A | 5967 | 5982 | AAACCTGGGCAAGGCT | 23 | 195 |
| 904868 | N/A | N/A | 6141 | 6156 | ATGCTTACTCCACACC | 75 | 196 |
| 904900 | N/A | N/A | 6211 | 6226 | CCCATGTTTGGTACAA | 54 | 197 |
| 904932 | N/A | N/A | 6263 | 6278 | CCTTGTCTCACTAAAC | 73 | 198 |
| 904964 | N/A | N/A | 6332 | 6347 | CTAAGACCAGTGAGAT | 58 | 199 |
| 904996 | N/A | N/A | 6404 | 6419 | GAAACCACCTGTAGGG | 53 | 200 |
| 905028 | N/A | N/A | 6544 | 6559 | GATGGGTACTTCTGTT | 88 | 201 |
| 905060 | N/A | N/A | 6605 | 6620 | TTAGAACAGCTGTAAC | 50 | 202 |
| 905092 | N/A | N/A | 6684 | 6699 | GGGCTGGTGGATATAA | 0 | 203 |
| 905124 | N/A | N/A | 6796 | 6811 | CGAGCGATTGTCTTGT | 76 | 204 |
| 905156 | N/A | N/A | 6881 | 6896 | GTTGCCGTGGCAACTC | 21 | 205 |
| 905188 | N/A | N/A | 7039 | 7054 | GAGTTTTTCCTCAGTC | 49 | 206 |
| 905220 | N/A | N/A | 7161 | 7176 | GAGGCACCTCCATGTT | 41 | 207 |
| 905252 | N/A | N/A | 7260 | 7275 | CAAAGGAGATTCCTCC | 35 | 208 |
| 905284 | N/A | N/A | 7342 | 7357 | CTCCCTTATAGCTTAC | 62 | 209 |
| 905316 | N/A | N/A | 7477 | 7492 | CGAGAGTCACCGCCCA | 72 | 210 |
| 905348 | N/A | N/A | 7845 | 7860 | TTCTTGCCGTGCACAC | 10 | 211 |
| 905380 | N/A | N/A | 7943 | 7958 | CGTGTGGTTTGCAGGG | 72 | 212 |
| 905412 | N/A | N/A | 8008 | 8023 | TAGGTCTACAAAGAAC | 71 | 213 |
| 905444 | N/A | N/A | 8090 | 8105 | TGGACTGCTCCCTGTA | 13 | 214 |
| 905476 | N/A | N/A | 8177 | 8192 | AGATGTGTTTAGGCAT | 96 | 215 |
| 905508 | N/A | N/A | 8330 | 8345 | CATCATTGGGTTATGA | 37 | 216 |
| 905540 | N/A | N/A | 8388 | 8403 | CACATGCCTGTTGGGT | 48 | 217 |
| 905572 | N/A | N/A | 8466 | 8481 | TTTTCAGCTCAGCACC | 49 | 218 |
| 905604 | N/A | N/A | 8633 | 8648 | AGACTCCAACCCTTTT | 53 | 219 |
| 905636 | N/A | N/A | 8746 | 8761 | TAATTCTATTAGAGGG | 83 | 220 |
| 905668 | N/A | N/A | 8833 | 8848 | TGAAGCTTTAAACTCA | 18 | 221 |
| 905700 | N/A | N/A | 8895 | 8910 | GACTTGTTTTATGGAG | 87 | 222 |
| 905732 | N/A | N/A | 8962 | 8977 | GGAGTGCATAACAGCC | 0 | 223 |

TABLE 4
Inhibition of APOL1 mRNA by 3-10-3 cEt gapmers
targeting SEQ ID NO: 1 and 2

| | SEQ | SEQ | SEQ | SEQ | | | |
|---|---|---|---|---|---|---|---|
| | ID: 1 | ID: 1 | ID: 2 | ID: 2 | | % | |
| Compound | Start | Stop | Start | Stop | | inhi- | SEQ |
| Number | Site | Site | Site | Site | Sequence | bition | ID NO |
| 793406 | N/A | N/A | 8306 | 8321 | GTTCAAAAGCAGCATT | 85 | 13 |
| 903429 | 27 | 42 | 520 | 535 | CCCCAAGATATACCGA | 0 | 224 |
| 903461 | 131 | 146 | 624 | 639 | GGAATCTTCCCCTGGC | 51 | 225 |
| 903493 | 256 | 271 | N/A | N/A | GCACCCTCGCTCCAGC | 24 | 226 |
| 903525 | 323 | 338 | 4798 | 4813 | GCAGCCCAGTCACCGA | 0 | 227 |
| 903621 | 563 | 578 | 12654 | 12669 | CTGTACTGCTGGCCTT | 87 | 228 |
| 903653 | 632 | 647 | 12723 | 12738 | GCACGGAGCCTTCTTA | 33 | 229 |
| 903685 | 673 | 688 | 12764 | 12779 | TGGTGGTGCCTTTGTG | 0 | 230 |
| 903717 | 744 | 759 | 12835 | 12850 | TGCCAGACCCATGCCG | 48 | 231 |
| 903749 | 817 | 832 | 12908 | 12923 | CGGTCAAAGCGGCTGT | 71 | 232 |
| 903781 | 853 | 868 | 12944 | 12959 | ACTTCTTTCCGTAGTC | 6 | 233 |
| 903813 | 940 | 955 | 13031 | 13046 | ATATGTTCTCACCCAA | 77 | 234 |
| 903845 | 1012 | 1027 | 13103 | 13118 | TGAGGGCACGGATGTC | 67 | 235 |
| 903877 | 1090 | 1105 | 13181 | 13196 | CAGCTGAGATTGGCTC | 19 | 236 |
| 903909 | 1130 | 1145 | 13221 | 13236 | ATGCTGGGTTCATTAA | 28 | 237 |
| 903941 | 1233 | 1248 | 13324 | 13339 | ATGTAAGTGCTTTGAT | 74 | 238 |
| 903973 | 1348 | 1363 | 13439 | 13454 | ACAGTTCTTGGTCCGC | 92 | 239 |
| 904005 | 1744 | 1759 | 13835 | 13850 | CTCACCCTCTTTATCC | 50 | 240 |
| 904037 | 1827 | 1842 | 13918 | 13933 | CTGCCATCTGCATTAA | 54 | 241 |
| 904069 | 1942 | 1957 | 14033 | 14048 | CCCCCCAATATATTCT | 67 | 242 |
| 904101 | 2340 | 2355 | 14431 | 14446 | GTTCTAACTCTTGGGC | 90 | 243 |
| 904133 | 2416 | 2431 | 14507 | 14522 | ACTTCATTCTTCGGAG | 27 | 244 |
| 904165 | 2514 | 2529 | 14605 | 14620 | ATCATCAGGAAGCCGC | 92 | 245 |
| 904197 | 2614 | 2629 | 14705 | 14720 | TGGCCATGGCCCACCA | 10 | 246 |
| 904229 | 2767 | 2782 | 14858 | 14873 | GAGCTTCCTCCCAATG | 0 | 247 |
| 904261 | 2839 | 2854 | 14930 | 14945 | ATGAGTAGGTGAGTTT | 84 | 248 |
| 904325 | N/A | N/A | 1378 | 1393 | AATCTCATGATTGCAA | 70 | 249 |
| 904357 | N/A | N/A | 872 | 887 | TGTCTCAGCAGTCAAA | 69 | 250 |
| 904389 | N/A | N/A | 2519 | 2534 | TTTGGTTCCTAGAAGA | 25 | 251 |
| 904421 | N/A | N/A | 3417 | 3432 | ACAACTGAGGGTATAT | 80 | 252 |
| 904453 | N/A | N/A | 4366 | 4381 | AGCATGTGTGATAACT | 88 | 253 |
| 904485 | N/A | N/A | 4818 | 4833 | TACCTGGGTCCATGGT | 6 | 254 |
| 904517 | N/A | N/A | 5067 | 5082 | GAGTCATTTGCTAGGT | 90 | 255 |
| 904549 | N/A | N/A | 5175 | 5190 | GCTGGTCAACCTCCTC | 40 | 256 |
| 904581 | N/A | N/A | 5306 | 5321 | GATACATTCCCACAGG | 60 | 257 |
| 904613 | N/A | N/A | 5394 | 5409 | AAGGGAGGTAAGGAGC | 15 | 258 |
| 904645 | N/A | N/A | 5493 | 5508 | GAGGCCCTATTGTGTG | 13 | 259 |
| 904677 | N/A | N/A | 5695 | 5710 | TATTGGGCCTCAGATT | 17 | 260 |
| 904709 | N/A | N/A | 5769 | 5784 | AGCACGAAGCCTCCTC | 60 | 261 |
| 904741 | N/A | N/A | 5813 | 5828 | TCATATTCACCCGATA | 76 | 262 |
| 904773 | N/A | N/A | 5872 | 5887 | TAAACCCAAACAGGCA | 76 | 263 |
| 904805 | N/A | N/A | 5936 | 5951 | CTGTATTCGGAGACCT | 54 | 264 |
| 904837 | N/A | N/A | 5970 | 5985 | CAAAAACCTGGGCAAG | 56 | 265 |
| 904869 | N/A | N/A | 6142 | 6157 | TATGCTTACTCCACAC | 57 | 266 |
| 904901 | N/A | N/A | 6213 | 6228 | TGCCCATGTTTGGTAC | 7 | 267 |
| 904933 | N/A | N/A | 6265 | 6280 | CTCCTTGTCTCACTAA | 50 | 268 |
| 904965 | N/A | N/A | 6333 | 6348 | GCTAAGACCAGTGAGA | 67 | 269 |
| 904997 | N/A | N/A | 6405 | 6420 | TGAAACCACCTGTAGG | 38 | 270 |
| 905029 | N/A | N/A | 6545 | 6560 | AGATGGGTACTTCTGT | 89 | 271 |
| 905061 | N/A | N/A | 6607 | 6622 | CTTTAGAACAGCTGTA | 57 | 272 |
| 905093 | N/A | N/A | 6698 | 6713 | TTCTTGATGTGGTGGG | 92 | 273 |
| 905125 | N/A | N/A | 6797 | 6812 | GCGAGCGATTGTCTTG | 59 | 274 |
| 905157 | N/A | N/A | 6882 | 6897 | GGTTGCCGTGGCAACT | 0 | 275 |
| 905189 | N/A | N/A | 7043 | 7058 | GGGAGAGTTTTTCCTC | 14 | 276 |
| 905221 | N/A | N/A | 7162 | 7177 | TGAGGCACCTCCATGT | 0 | 277 |
| 905253 | N/A | N/A | 7261 | 7276 | GCAAAGGAGATTCCTC | 61 | 278 |
| 905285 | N/A | N/A | 7343 | 7358 | TCTCCCTTATAGCTTA | 71 | 279 |
| 905317 | N/A | N/A | 7478 | 7493 | GCGAGAGTCACCGCCC | 0 | 280 |
| 905349 | N/A | N/A | 7846 | 7861 | TTTCTTGCCGTGCACA | 17 | 281 |
| 905381 | N/A | N/A | 7957 | 7972 | AGCTGCCACCAAAACG | 25 | 282 |
| 905413 | N/A | N/A | 8009 | 8024 | GTAGGTCTACAAAGAA | 79 | 283 |
| 905445 | N/A | N/A | 8091 | 8106 | CTGGACTGCTCCCTGT | 20 | 284 |
| 905477 | N/A | N/A | 8178 | 8193 | CAGATGTGTTTAGGCA | 97 | 285 |
| 905509 | N/A | N/A | 8331 | 8346 | ACATCATTGGGTTATG | 82 | 286 |
| 905541 | N/A | N/A | 8389 | 8404 | CCACATGCCTGTTGGG | 1 | 287 |
| 905573 | N/A | N/A | 8472 | 8487 | GAATCCTTTTCAGCTC | 63 | 288 |
| 905605 | N/A | N/A | 8634 | 8649 | CAGACTCCAACCCTTT | 49 | 289 |
| 905637 | N/A | N/A | 8747 | 8762 | CTAATTCTATTAGAGG | 35 | 290 |
| 905669 | N/A | N/A | 8835 | 8850 | GCTGAAGCTTTAAACT | 7 | 291 |
| 905701 | N/A | N/A | 8899 | 8914 | GTGGGACTTGTTTTAT | 72 | 292 |
| 905733 | N/A | N/A | 8963 | 8978 | GGGAGTGCATAACAGC | 30 | 293 |

TABLE 5
Inhibition of APOL1 mRNA by 3-10-3 cEt gapmers
targeting SEQ ID NO: 1 and 2

| | SEQ | SEQ | SEQ | SEQ | | | |
|---|---|---|---|---|---|---|---|
| | ID: 1 | ID: 1 | ID: 2 | ID: 2 | | % | SEQ |
| Compound | Start | Stop | Start | Stop | | inhi- | SEQ |
| Number | Site | Site | Site | Site | Sequence | bition | ID NO |
| 793406 | N/A | N/A | 8306 | 8321 | GTTCAAAAGCAGCATT | 85 | 13 |
| 903430 | 28 | 43 | 521 | 536 | TCCCCAAGATATACCG | 0 | 294 |
| 903462 | 132 | 147 | 625 | 640 | AGGAATCTTCCCCTGG | 0 | 295 |
| 903494 | 257 | 272 | N/A | N/A | TGCACCCTCGCTCCAG | 6 | 296 |
| 903526 | 324 | 339 | 4799 | 4814 | AGCAGCCCAGTCACCG | 0 | 297 |
| 903622 | 564 | 579 | 12655 | 12670 | TCTGTACTGCTGGCCT | 46 | 298 |
| 903654 | 633 | 648 | 12724 | 12739 | GGCACGGAGCCTTCTT | 13 | 299 |
| 903686 | 674 | 689 | 12765 | 12780 | ATGGTGGTGCCTTTGT | 0 | 300 |
| 903718 | 745 | 760 | 12836 | 12851 | GTGCCAGACCCATGCC | 32 | 301 |
| 903750 | 818 | 833 | 12909 | 12924 | CCGGTCAAAGCGGCTG | 0 | 302 |
| 903782 | 854 | 869 | 12945 | 12960 | CACTTCTTTCCGTAGT | 0 | 303 |
| 903814 | 941 | 956 | 13032 | 13047 | GATATGTTCTCACCCA | 94 | 304 |
| 903846 | 1013 | 1028 | 13104 | 13119 | CTGAGGGCACGGATGT | 65 | 305 |
| 903878 | 1091 | 1106 | 13182 | 13197 | TCAGCTGAGATTGGCT | 0 | 306 |
| 903910 | 1131 | 1146 | 13222 | 13237 | GATGCTGGGTTCATTA | 0 | 307 |
| 903942 | 1235 | 1250 | 13326 | 13341 | TCATGTAAGTGCTTTG | 85 | 308 |
| 903974 | 1349 | 1364 | 13440 | 13455 | CACAGTTCTTGGTCCG | 89 | 309 |
| 904006 | 1747 | 1762 | 13838 | 13853 | TACCTCACCCTCTTTA | 66 | 310 |
| 904038 | 1828 | 1843 | 13919 | 13934 | ACTGCCATCTGCATTA | 0 | 311 |
| 904070 | 1943 | 1958 | 14034 | 14049 | GCCCCCCAATATATTC | 29 | 312 |
| 904102 | 2341 | 2356 | 14432 | 14447 | TGTTCTAACTCTTGGG | 90 | 313 |
| 904134 | 2417 | 2432 | 14508 | 14523 | GACTTCATTCTTCGGA | 85 | 314 |
| 904166 | 2515 | 2530 | 14606 | 14621 | CATCATCAGGAAGCCG | 88 | 315 |
| 904198 | 2615 | 2630 | 14706 | 14721 | ATGGCCATGGCCCACC | 0 | 316 |
| 904230 | 2768 | 2783 | 14859 | 14874 | TGAGCTTCCTCCCAAT | 35 | 317 |
| 904262 | 2840 | 2855 | 14931 | 14946 | GATGAGTAGGTGAGTT | 82 | 318 |
| 904326 | N/A | N/A | 1379 | 1394 | GAATCTCATGATTGCA | 68 | 319 |
| 904358 | N/A | N/A | 919 | 934 | AGATGGGCACCCCCAA | 3 | 320 |
| 904390 | N/A | N/A | 2533 | 2548 | TTCCGGGAAGTGACTT | 27 | 321 |
| 904422 | N/A | N/A | 3539 | 3554 | AACACCAATTAGTACA | 64 | 322 |
| 904454 | N/A | N/A | 4384 | 4399 | CAATGACCAGGGCCTG | 30 | 323 |
| 904486 | N/A | N/A | 4822 | 4837 | AGCCTACCTGGGTCCA | 0 | 324 |
| 904518 | N/A | N/A | 5068 | 5083 | TGAGTCATTTGCTAGG | 48 | 325 |
| 904550 | N/A | N/A | 5194 | 5209 | GAGGTGACAGGTCGGG | 33 | 326 |
| 904582 | N/A | N/A | 5307 | 5322 | CGATACATTCCCACAG | 29 | 327 |
| 904614 | N/A | N/A | 5406 | 5421 | ATGGTACAGGAGAAGG | 89 | 328 |
| 904646 | N/A | N/A | 5494 | 5509 | GGAGGCCCTATTGTGT | 10 | 329 |
| 904678 | N/A | N/A | 5696 | 5711 | CTATTGGGCCTCAGAT | 49 | 330 |
| 904710 | N/A | N/A | 5771 | 5786 | ATAGCACGAAGCCTCC | 72 | 331 |
| 904742 | N/A | N/A | 5814 | 5829 | TTCATATTCACCCGAT | 66 | 332 |
| 904774 | N/A | N/A | 5873 | 5888 | GTAAACCCAAACAGGC | 71 | 333 |
| 904806 | N/A | N/A | 5937 | 5952 | CCTGTATTCGGAGACC | 66 | 334 |
| 904838 | N/A | N/A | 5972 | 5987 | ATCAAAAACCTGGGCA | 75 | 335 |
| 904870 | N/A | N/A | 6143 | 6158 | TTATGCTTACTCCACA | 71 | 336 |
| 904902 | N/A | N/A | 6214 | 6229 | ATGCCCATGTTTGGTA | 0 | 337 |
| 904934 | N/A | N/A | 6266 | 6281 | CCTCCTTGTCTCACTA | 0 | 338 |
| 904966 | N/A | N/A | 6334 | 6349 | AGCTAAGACCAGTGAG | 21 | 339 |
| 904998 | N/A | N/A | 6406 | 6421 | CTGAAACCACCTGTAG | 47 | 340 |
| 905030 | N/A | N/A | 6546 | 6561 | CAGATGGGTACTTCTG | 41 | 341 |
| 905062 | N/A | N/A | 6609 | 6624 | GCCTTTAGAACAGCTG | 23 | 342 |
| 905094 | N/A | N/A | 6700 | 6715 | ATTTCTTGATGTGGTG | 98 | 343 |
| 905126 | N/A | N/A | 6798 | 6813 | GGCGAGCGATTGTCTT | 84 | 344 |
| 905158 | N/A | N/A | 6883 | 6898 | TGGTTGCCGTGGCAAC | 0 | 345 |
| 905190 | N/A | N/A | 7059 | 7074 | ATCATCTTGTTTTGGG | 80 | 346 |
| 905222 | N/A | N/A | 7163 | 7178 | TTGAGGCACCTCCATG | 0 | 347 |
| 905254 | N/A | N/A | 7263 | 7278 | ATGCAAAGGAGATTCC | 28 | 348 |
| 905286 | N/A | N/A | 7344 | 7359 | TTCTCCCTTATAGCTT | 33 | 349 |
| 905318 | N/A | N/A | 7479 | 7494 | AGCGAGAGTCACCGCC | 4 | 350 |
| 905350 | N/A | N/A | 7847 | 7862 | GTTTCTTGCCGTGCAC | 22 | 351 |
| 905382 | N/A | N/A | 7960 | 7975 | GTCAGCTGCCACCAAA | 76 | 352 |
| 905414 | N/A | N/A | 8010 | 8025 | GGTAGGTCTACAAAGA | 78 | 353 |
| 905446 | N/A | N/A | 8095 | 8110 | GAGGCTGGACTGCTCC | 0 | 354 |
| 905478 | N/A | N/A | 8179 | 8194 | CCAGATGTGTTTAGGC | 87 | 355 |
| 905510 | N/A | N/A | 8332 | 8347 | CACATCATTGGGTTAT | 92 | 356 |
| 905542 | N/A | N/A | 8390 | 8405 | GCCACATGCCTGTTGG | 0 | 357 |
| 905574 | N/A | N/A | 8481 | 8496 | GAGAGGAATGAATCCT | 37 | 358 |
| 905606 | N/A | N/A | 8644 | 8659 | GAGTCCTCCCCAGACT | 0 | 359 |
| 905638 | N/A | N/A | 8750 | 8765 | GCTCTAATTCTATTAG | 0 | 360 |
| 905670 | N/A | N/A | 8836 | 8851 | TGCTGAAGCTTTAAAC | 13 | 361 |
| 905702 | N/A | N/A | 8900 | 8915 | TGTGGGACTTGTTTTA | 64 | 362 |
| 905734 | N/A | N/A | 8965 | 8980 | GTGGGAGTGCATAACA | 0 | 363 |

TABLE 6
Inhibition of APOL1 mRNA by 3-10-3 cEt gapmers targeting SEQ ID NO: 1 and 2

| | SEQ | SEQ | SEQ | SEQ | | | |
|---|---|---|---|---|---|---|---|
| | ID: 1 | ID: 1 | ID: 2 | ID: 2 | | % | SEQ |
| Compound | Start | Stop | Start | Stop | | inhi- | ID |
| Number | Site | Site | Site | Site | Sequence | bition | NO |
| 793406 | N/A | N/A | 8306 | 8321 | GTTCAAAAGCAGCATT | 80 | 13 |
| 903431 | 29 | 44 | 522 | 537 | GTCCCCAAGATATACC | 2 | 364 |
| 903463 | 135 | 150 | 628 | 643 | CCAAGGAATCTTCCCC | 53 | 365 |
| 903495 | 258 | 273 | N/A | N/A | TTGCACCCTCGCTCCA | 25 | 366 |
| 903527 | 329 | 344 | 4804 | 4819 | GTGCCAGCAGCCCAGT | 0 | 367 |
| 903623 | 565 | 580 | 12656 | 12671 | TTCTGTACTGCTGGCC | 15 | 368 |
| 903655 | 634 | 649 | 12725 | 12740 | GGGCACGGAGCCTTCT | 0 | 369 |
| 903687 | 675 | 690 | 12766 | 12781 | GATGGTGGTGCCTTTG | 0 | 370 |
| 903719 | 746 | 761 | 12837 | 12852 | GGTGCCAGACCCATGC | 0 | 371 |
| 903751 | 819 | 834 | 12910 | 12925 | CCCGGTCAAAGCGGCT | 0 | 372 |
| 903783 | 855 | 870 | 12946 | 12961 | CCACTTCTTTCCGTAG | 51 | 373 |
| 903815 | 946 | 961 | 13037 | 13052 | AGTTGGATATGTTCTC | 81 | 374 |
| 903847 | 1014 | 1029 | 13105 | 13120 | TCTGAGGGCACGGATG | 24 | 375 |
| 903879 | 1092 | 1107 | 13183 | 13198 | TTCAGCTGAGATTGGC | 49 | 376 |
| 903911 | 1132 | 1147 | 13223 | 13238 | GGATGCTGGGTTCATT | 41 | 377 |
| 903943 | 1236 | 1251 | 13327 | 13342 | CTCATGTAAGTGCTTT | 81 | 378 |
| 903975 | 1351 | 1366 | 13442 | 13457 | GTCACAGTTCTTGGTC | 54 | 379 |
| 904007 | 1748 | 1763 | 13839 | 13854 | TTACCTCACCCTCTTT | 64 | 380 |
| 904039 | 1829 | 1844 | 13920 | 13935 | CACTGCCATCTGCATT | 57 | 381 |
| 904071 | 1944 | 1959 | 14035 | 14050 | GGCCCCCCAATATATT | 0 | 382 |
| 904103 | 2342 | 2357 | 14433 | 14448 | CTGTTCTAACTCTTGG | 93 | 383 |
| 904135 | 2418 | 2433 | 14509 | 14524 | AGACTTCATTCTTCGG | 69 | 384 |
| 904167 | 2516 | 2531 | 14607 | 14622 | CCATCATCAGGAAGCC | 87 | 385 |
| 904199 | 2620 | 2635 | 14711 | 14726 | GGACCATGGCCATGGC | 0 | 386 |
| 904231 | 2772 | 2787 | 14863 | 14878 | GATCTGAGCTTCCTCC | 44 | 387 |
| 904263 | 2841 | 2856 | 14932 | 14947 | TGATGAGTAGGTGAGT | 81 | 388 |
| 904327 | N/A | N/A | 1380 | 1395 | TGAATCTCATGATTGC | 75 | 389 |
| 904359 | N/A | N/A | 1002 | 1017 | GTGTGGCCTGGCCATA | 0 | 390 |
| 904391 | N/A | N/A | 2544 | 2559 | CGGTTGGTCAATTCCG | 0 | 391 |
| 904423 | N/A | N/A | 3741 | 3756 | CAGAGGCTATCAACAA | 90 | 392 |
| 904455 | N/A | N/A | 4391 | 4406 | GTTCTGACAATGACCA | 50 | 393 |
| 904487 | N/A | N/A | 4830 | 4845 | AGGAGGTGAGCCTACC | 0 | 394 |
| 904519 | N/A | N/A | 5069 | 5084 | TTGAGTCATTTGCTAG | 47 | 395 |
| 904551 | N/A | N/A | 5196 | 5211 | GGGAGGTGACAGGTCG | 36 | 396 |
| 904583 | N/A | N/A | 5309 | 5324 | CCCGATACATTCCCAC | 50 | 397 |
| 904615 | N/A | N/A | 5407 | 5422 | CATGGTACAGGAGAAG | 32 | 398 |
| 904647 | N/A | N/A | 5495 | 5510 | GGGAGGCCCTATTGTG | 14 | 399 |
| 904679 | N/A | N/A | 5697 | 5712 | TCTATTGGGCCTCAGA | 15 | 400 |
| 904711 | N/A | N/A | 5772 | 5787 | CATAGCACGAAGCCTC | 70 | 401 |
| 904743 | N/A | N/A | 5815 | 5830 | TTTCATATTCACCCGA | 87 | 402 |
| 904775 | N/A | N/A | 5874 | 5889 | GGTAAACCCAAACAGG | 54 | 403 |
| 904807 | N/A | N/A | 5938 | 5953 | ACCTGTATTCGGAGAC | 58 | 404 |
| 904839 | N/A | N/A | 5974 | 5989 | GCATCAAAAACCTGGG | 52 | 405 |
| 904871 | N/A | N/A | 6144 | 6159 | CTTATGCTTACTCCAC | 85 | 406 |
| 904903 | N/A | N/A | 6215 | 6230 | TATGCCCATGTTTGGT | 51 | 407 |
| 904935 | N/A | N/A | 6268 | 6283 | ACCCTCCTTGTCTCAC | 37 | 408 |
| 904967 | N/A | N/A | 6335 | 6350 | CAGCTAAGACCAGTGA | 65 | 409 |
| 904999 | N/A | N/A | 6407 | 6422 | GCTGAAACCACCTGTA | 66 | 410 |
| 905031 | N/A | N/A | 6547 | 6562 | TCAGATGGGTACTTCT | 89 | 411 |
| 905063 | N/A | N/A | 6610 | 6625 | GGCCTTTAGAACAGCT | 0 | 412 |
| 905095 | N/A | N/A | 6702 | 6717 | GTATTTCTTGATGTGG | 98 | 413 |
| 905127 | N/A | N/A | 6799 | 6814 | GGGCGAGCGATTGTCT | 16 | 414 |
| 905159 | N/A | N/A | 6884 | 6899 | TTGGTTGCCGTGGCAA | 6 | 415 |
| 905191 | N/A | N/A | 7060 | 7075 | GATCATCTTGTTTTGG | 51 | 416 |
| 905223 | N/A | N/A | 7164 | 7179 | CTTGAGGCACCTCCAT | 35 | 417 |
| 905255 | N/A | N/A | 7264 | 7279 | CATGCAAAGGAGATTC | 0 | 418 |
| 905287 | N/A | N/A | 7345 | 7360 | ATTCTCCCTTATAGCT | 15 | 419 |
| 905319 | N/A | N/A | 7480 | 7495 | CAGCGAGAGTCACCGC | 0 | 420 |
| 905351 | N/A | N/A | 7848 | 7863 | TGTTTCTTGCCGTGCA | 34 | 421 |
| 905383 | N/A | N/A | 7963 | 7978 | GAAGTCAGCTGCCACC | 87 | 422 |
| 905415 | N/A | N/A | 8011 | 8026 | TGGTAGGTCTACAAAG | 76 | 423 |
| 905447 | N/A | N/A | 8109 | 8124 | GACCATTCCCAGCAGA | 65 | 424 |
| 905479 | N/A | N/A | 8180 | 8195 | TCCAGATGTGTTTAGG | 83 | 425 |
| 905511 | N/A | N/A | 8333 | 8348 | ACACATCATTGGGTTA | 85 | 426 |
| 905543 | N/A | N/A | 8404 | 8419 | GATCACTTCCATCTGC | 0 | 427 |
| 905575 | N/A | N/A | 8492 | 8507 | ATGGTGCTTTGGAGAG | 5 | 428 |
| 905607 | N/A | N/A | 8649 | 8664 | CAAGAGAGTCCTCCCC | 57 | 429 |
| 905639 | N/A | N/A | 8751 | 8766 | GGCTCTAATTCTATTA | 0 | 430 |
| 905671 | N/A | N/A | 8862 | 8877 | GGAATTGTGTGCCCCC | 43 | 431 |
| 905703 | N/A | N/A | 8902 | 8917 | GATGTGGGACTTGTTT | 82 | 432 |
| 905735 | N/A | N/A | 8966 | 8981 | TGTGGGAGTGCATAAC | 0 | 433 |

TABLE 7
Inhibition of APOL1 mRNA by 3-10-3 cEt gapmers targeting SEQ ID NO: 1 and 2

| | SEQ | SEQ | SEQ | SEQ | | | |
|---|---|---|---|---|---|---|---|
| | ID: 1 | ID: 1 | ID: 2 | ID: 2 | | % | SEQ |
| Compound | Start | Stop | Start | Stop | | inhi- | ID |
| Number | Site | Site | Site | Site | Sequence | bition | NO |
| 793406 | N/A | N/A | 8306 | 8321 | GTTCAAAAGCAGCATT | 86 | 13 |
| 903432 | 30 | 45 | 523 | 538 | AGTCCCCAAGATATAC | 0 | 434 |
| 903464 | 142 | 157 | N/A | N/A | GCCTCCTCCAAGGAAT | 9 | 435 |
| 903496 | 259 | 274 | N/A | N/A | GTTGCACCCTCGCTCC | 13 | 436 |
| 903528 | 331 | 346 | 4806 | 4821 | TGGTGCCAGCAGCCCA | 0 | 437 |
| 903624 | 566 | 581 | 12657 | 12672 | TTTCTGTACTGCTGGC | 64 | 438 |
| 903656 | 635 | 650 | 12726 | 12741 | AGGGCACGGAGCCTTC | 0 | 439 |
| 903688 | 676 | 691 | 12767 | 12782 | CGATGGTGGTGCCTTT | 0 | 440 |
| 903720 | 747 | 762 | 12838 | 12853 | GGGTGCCAGACCCATG | 5 | 441 |
| 903752 | 820 | 835 | 12911 | 12926 | TCCCGGTCAAAGCGGC | 0 | 442 |
| 903784 | 856 | 871 | 12947 | 12962 | ACCACTTCTTTCCGTA | 23 | 443 |
| 903816 | 947 | 962 | 13038 | 13053 | AAGTTGGATATGTTCT | 74 | 444 |
| 903848 | 1015 | 1030 | 13106 | 13121 | GTCTGAGGGCACGGAT | 37 | 445 |
| 903880 | 1093 | 1108 | 13184 | 13199 | TTTCAGCTGAGATTGG | 56 | 446 |
| 903912 | 1133 | 1148 | 13224 | 13239 | AGGATGCTGGGTTCAT | 66 | 447 |
| 903944 | 1237 | 1252 | 13328 | 13343 | CCTCATGTAAGTGCTT | 70 | 448 |
| 903976 | 1353 | 1368 | 13444 | 13459 | TGGTCACAGTTCTTGG | 89 | 449 |
| 904008 | 1751 | 1766 | 13842 | 13857 | ACTTTACCTCACCCTC | 80 | 450 |
| 904040 | 1830 | 1845 | 13921 | 13936 | GCACTGCCATCTGCAT | 23 | 451 |
| 904072 | 1945 | 1960 | 14036 | 14051 | CGGCCCCCCAATATAT | 0 | 452 |
| 904104 | 2343 | 2358 | 14434 | 14449 | ACTGTTCTAACTCTTG | 90 | 453 |
| 904136 | 2419 | 2434 | 14510 | 14525 | AAGACTTCATTCTTCG | 23 | 454 |
| 904168 | 2517 | 2532 | 14608 | 14623 | ACCATCATCAGGAAGC | 82 | 455 |
| 904200 | 2621 | 2636 | 14712 | 14727 | GGGACCATGGCCATGG | 74 | 456 |
| 904232 | 2773 | 2788 | 14864 | 14879 | AGATCTGAGCTTCCTC | 9 | 457 |
| 904264 | 2842 | 2857 | 14933 | 14948 | TTGATGAGTAGGTGAG | 93 | 458 |
| 904328 | N/A | N/A | 1381 | 1396 | TTGAATCTCATGATTG | 48 | 459 |
| 904360 | N/A | N/A | 1049 | 1064 | TGTTGCCCCCATTGGG | 3 | 460 |
| 904392 | N/A | N/A | 2549 | 2564 | TCTGCCGGTTGGTCAA | 18 | 461 |
| 904424 | N/A | N/A | 3753 | 3768 | GAATGAGCAGGTCAGA | 95 | 462 |
| 904456 | N/A | N/A | 4392 | 4407 | GGTTCTGACAATGACC | 37 | 463 |
| 904488 | N/A | N/A | 4831 | 4846 | GAGGAGGTGAGCCTAC | 35 | 464 |
| 904520 | N/A | N/A | 5070 | 5085 | CTTGAGTCATTTGCTA | 63 | 465 |
| 904552 | N/A | N/A | 5197 | 5212 | CGGGAGGTGACAGGTC | 41 | 466 |
| 904584 | N/A | N/A | 5310 | 5325 | GCCCGATACATTCCCA | 16 | 467 |
| 904616 | N/A | N/A | 5409 | 5424 | CTCATGGTACAGGAGA | 56 | 468 |
| 904648 | N/A | N/A | 5496 | 5511 | AGGGAGGCCCTATTGT | 14 | 469 |
| 904680 | N/A | N/A | 5698 | 5713 | TTCTATTGGGCCTCAG | 90 | 470 |
| 904712 | N/A | N/A | 5773 | 5788 | CCATAGCACGAAGCCT | 72 | 471 |
| 904744 | N/A | N/A | 5816 | 5831 | GTTTCATATTCACCCG | 95 | 472 |
| 904776 | N/A | N/A | 5875 | 5890 | AGGTAAACCCAAACAG | 59 | 473 |
| 904808 | N/A | N/A | 5939 | 5954 | CACCTGTATTCGGAGA | 16 | 474 |
| 904840 | N/A | N/A | 5975 | 5990 | AGCATCAAAAACCTGG | 88 | 475 |
| 904872 | N/A | N/A | 6145 | 6160 | CCTTATGCTTACTCCA | 92 | 476 |
| 904904 | N/A | N/A | 6216 | 6231 | GTATGCCCATGTTTGG | 34 | 477 |
| 904936 | N/A | N/A | 6269 | 6284 | TACCCTCCTTGTCTCA | 54 | 478 |
| 904968 | N/A | N/A | 6336 | 6351 | TCAGCTAAGACCAGTG | 89 | 479 |
| 905000 | N/A | N/A | 6409 | 6424 | TTGCTGAAACCACCTG | 74 | 480 |
| 905032 | N/A | N/A | 6548 | 6563 | ATCAGATGGGTACTTC | 94 | 481 |
| 905064 | N/A | N/A | 6611 | 6626 | AGGCCTTTAGAACAGC | 26 | 482 |
| 905096 | N/A | N/A | 6714 | 6729 | CACTAAATCTGTGTAT | 8 | 483 |
| 905128 | N/A | N/A | 6800 | 6815 | TGGGCGAGCGATTGTC | 87 | 484 |
| 905160 | N/A | N/A | 6885 | 6900 | CTTGGTTGCCGTGGCA | 27 | 485 |
| 905192 | N/A | N/A | 7076 | 7091 | CTGTTATTAAACCACA | 67 | 486 |
| 905224 | N/A | N/A | 7165 | 7180 | CCTTGAGGCACCTCCA | 35 | 487 |
| 905256 | N/A | N/A | 7265 | 7280 | CCATGCAAAGGAGATT | 68 | 488 |
| 905288 | N/A | N/A | 7346 | 7361 | CATTCTCCCTTATAGC | 42 | 489 |
| 905320 | N/A | N/A | 7481 | 7496 | ACAGCGAGAGTCACCG | 78 | 490 |
| 905352 | N/A | N/A | 7849 | 7864 | TTGTTTCTTGCCGTGC | 57 | 491 |
| 905384 | N/A | N/A | 7964 | 7979 | TGAAGTCAGCTGCCAC | 79 | 492 |
| 905416 | N/A | N/A | 8012 | 8027 | ATGGTAGGTCTACAAA | 64 | 493 |
| 905448 | N/A | N/A | 8115 | 8130 | ATTCCTGACCATTCCC | 75 | 494 |
| 905480 | N/A | N/A | 8181 | 8196 | ATCCAGATGTGTTTAG | 86 | 495 |
| 905512 | N/A | N/A | 8334 | 8349 | AACACATCATTGGGTT | 27 | 496 |
| 905544 | N/A | N/A | 8405 | 8420 | TGATCACTTCCATCTG | 0 | 497 |
| 905576 | N/A | N/A | 8493 | 8508 | CATGGTGCTTTGGAGA | 40 | 498 |
| 905608 | N/A | N/A | 8659 | 8674 | CATAAGCCAGCAAGAG | 40 | 499 |
| 905640 | N/A | N/A | 8752 | 8767 | GGGCTCTAATTCTATT | 0 | 500 |
| 905672 | N/A | N/A | 8863 | 8878 | GGGAATTGTGTGCCCC | 24 | 501 |
| 905704 | N/A | N/A | 8903 | 8918 | TGATGTGGGACTTGTT | 92 | 502 |
| 905736 | N/A | N/A | 8967 | 8982 | GTGTGGGAGTGCATAA | 0 | 503 |

TABLE 8
Inhibition of APOL1 mRNA by 3-10-3 cEt gapmers targeting SEQ ID NO: 1 and 2

| | SEQ | SEQ | SEQ | SEQ | | | |
|---|---|---|---|---|---|---|---|
| | ID: 1 | ID: 1 | ID: 2 | ID: 2 | | % | SEQ |
| Compound | Start | Stop | Start | Stop | | inhi- | ID |
| Number | Site | Site | Site | Site | Sequence | bition | NO |
| 793406 | N/A | N/A | 8306 | 8321 | GTTCAAAAGCAGCATT | 80 | 13 |
| 903433 | 31 | 46 | 524 | 539 | CAGTCCCCAAGATATA | 24 | 504 |
| 903465 | 144 | 159 | N/A | N/A | GGGCCTCCTCCAAGGA | 0 | 505 |
| 903497 | 260 | 275 | N/A | N/A | TGTTGCACCCTCGCTC | 42 | 506 |
| 903529 | 332 | 347 | 4807 | 4822 | ATGGTGCCAGCAGCCC | 0 | 507 |
| 903625 | 567 | 582 | 12658 | 12673 | GTTTCTGTACTGCTGG | 72 | 508 |
| 903657 | 636 | 651 | 12727 | 12742 | AAGGGCACGGAGCCTT | 61 | 509 |
| 903689 | 677 | 692 | 12768 | 12783 | GCGATGGTGGTGCCTT | 32 | 510 |
| 903721 | 748 | 763 | 12839 | 12854 | AGGGTGCCAGACCCAT | 0 | 511 |
| 903753 | 821 | 836 | 12912 | 12927 | ATCCCGGTCAAAGCGG | 0 | 512 |
| 903785 | 857 | 872 | 12948 | 12963 | CACCACTTCTTTCCGT | 22 | 513 |
| 903817 | 949 | 964 | 13040 | 13055 | GAAAGTTGGATATGTT | 83 | 514 |
| 903849 | 1016 | 1031 | 13107 | 13122 | CGTCTGAGGGCACGGA | 15 | 515 |
| 903881 | 1094 | 1109 | 13185 | 13200 | CTTTCAGCTGAGATTG | 57 | 516 |
| 903913 | 1134 | 1149 | 13225 | 13240 | CAGGATGCTGGGTTCA | 76 | 517 |
| 903945 | 1238 | 1253 | 13329 | 13344 | CCCTCATGTAAGTGCT | 67 | 518 |
| 903977 | 1354 | 1369 | 13445 | 13460 | GTGGTCACAGTTCTTG | 0 | 519 |
| 904009 | 1752 | 1767 | 13843 | 13858 | AACTTTACCTCACCCT | 87 | 520 |
| 904041 | 1838 | 1853 | 13929 | 13944 | TCCTTGCTGCACTGCC | 94 | 521 |
| 904073 | 1946 | 1961 | 14037 | 14052 | CCGGCCCCCCAATATA | 3 | 522 |
| 904105 | 2345 | 2360 | 14436 | 14451 | CAACTGTTCTAACTCT | 74 | 523 |
| 904137 | 2482 | 2497 | 14573 | 14588 | GCCCCCAGGAGGACAA | 5 | 524 |
| 904169 | 2518 | 2533 | 14609 | 14624 | GACCATCATCAGGAAG | 79 | 525 |
| 904201 | 2672 | 2687 | 14763 | 14778 | CACATACTCTCTGGGA | 47 | 526 |
| 904233 | 2774 | 2789 | 14865 | 14880 | GAGATCTGAGCTTCCT | 88 | 527 |
| 904265 | 2843 | 2858 | 14934 | 14949 | CTTGATGAGTAGGTGA | 78 | 528 |
| 904361 | N/A | N/A | 1052 | 1067 | TTCTGTTGCCCCCATT | 68 | 529 |
| 904393 | N/A | N/A | 2558 | 2573 | CTGGGCGAGTCTGCCG | 0 | 530 |
| 904425 | N/A | N/A | 3756 | 3771 | GTAGAATGAGCAGGTC | 97 | 531 |
| 904457 | N/A | N/A | 4426 | 4441 | AGAGTCTATACACAGA | 75 | 532 |
| 904489 | N/A | N/A | 4851 | 4866 | GAGTAGGAACCAGCAG | 84 | 533 |
| 904521 | N/A | N/A | 5071 | 5086 | ACTTGAGTCATTTGCT | 85 | 534 |
| 904553 | N/A | N/A | 5198 | 5213 | GCGGGAGGTGACAGGT | 33 | 535 |
| 904585 | N/A | N/A | 5311 | 5326 | GGCCCGATACATTCCC | 0 | 536 |
| 904617 | N/A | N/A | 5410 | 5425 | TCTCATGGTACAGGAG | 75 | 537 |
| 904649 | N/A | N/A | 5497 | 5512 | TAGGGAGGCCCTATTG | 14 | 538 |
| 904681 | N/A | N/A | 5699 | 5714 | ATTCTATTGGGCCTCA | 89 | 539 |
| 904713 | N/A | N/A | 5775 | 5790 | CACCATAGCACGAAGC | 90 | 540 |
| 904745 | N/A | N/A | 5817 | 5832 | AGTTTCATATTCACCC | 95 | 541 |
| 904777 | N/A | N/A | 5877 | 5892 | CAAGGTAAACCCAAAC | 30 | 542 |
| 904809 | N/A | N/A | 5940 | 5955 | TCACCTGTATTCGGAG | 32 | 543 |
| 904841 | N/A | N/A | 6017 | 6032 | CTAAAAGCTGATTTGC | 52 | 544 |
| 904873 | N/A | N/A | 6146 | 6161 | TCCTTATGCTTACTCC | 93 | 545 |
| 904905 | N/A | N/A | 6219 | 6234 | CATGTATGCCCATGTT | 61 | 546 |
| 904937 | N/A | N/A | 6270 | 6285 | ATACCCTCCTTGTCTC | 39 | 547 |
| 904969 | N/A | N/A | 6337 | 6352 | TTCAGCTAAGACCAGT | 89 | 548 |
| 905001 | N/A | N/A | 6410 | 6425 | GTTGCTGAAACCACCT | 64 | 549 |
| 905033 | N/A | N/A | 6549 | 6564 | TATCAGATGGGTACTT | 66 | 550 |
| 905065 | N/A | N/A | 6612 | 6627 | GAGGCCTTTAGAACAG | 0 | 551 |
| 905097 | N/A | N/A | 6715 | 6730 | GCACTAAATCTGTGTA | 24 | 552 |
| 905129 | N/A | N/A | 6801 | 6816 | CTGGGCGAGCGATTGT | 61 | 553 |
| 905161 | N/A | N/A | 6886 | 6901 | ACTTGGTTGCCGTGGC | 27 | 554 |
| 905193 | N/A | N/A | 7077 | 7092 | CCTGTTATTAAACCAC | 81 | 555 |
| 905225 | N/A | N/A | 7166 | 7181 | TCCTTGAGGCACCTCC | 32 | 556 |
| 905257 | N/A | N/A | 7266 | 7281 | ACCATGCAAAGGAGAT | 30 | 557 |
| 905289 | N/A | N/A | 7347 | 7362 | GCATTCTCCCTTATAG | 75 | 558 |
| 905321 | N/A | N/A | 7482 | 7497 | GACAGCGAGAGTCACC | 29 | 559 |
| 905353 | N/A | N/A | 7850 | 7865 | ATTGTTTCTTGCCGTG | 55 | 560 |
| 905385 | N/A | N/A | 7967 | 7982 | TCCTGAAGTCAGCTGC | 56 | 561 |
| 905417 | N/A | N/A | 8013 | 8028 | AATGGTAGGTCTACAA | 85 | 562 |
| 905449 | N/A | N/A | 8116 | 8131 | TATTCCTGACCATTCC | 77 | 563 |
| 905481 | N/A | N/A | 8182 | 8197 | AATCCAGATGTGTTTA | 81 | 564 |
| 905513 | N/A | N/A | 8336 | 8351 | TCAACACATCATTGGG | 88 | 565 |
| 905545 | N/A | N/A | 8406 | 8421 | GTGATCACTTCCATCT | 84 | 566 |
| 905577 | N/A | N/A | 8494 | 8509 | CCATGGTGCTTTGGAG | 4 | 567 |
| 905609 | N/A | N/A | 8660 | 8675 | CCATAAGCCAGCAAGA | 53 | 568 |
| 905641 | N/A | N/A | 8753 | 8768 | AGGGCTCTAATTCTAT | 0 | 569 |
| 905673 | N/A | N/A | 8864 | 8879 | AGGGAATTGTGTGCCC | 11 | 570 |
| 905705 | N/A | N/A | 8904 | 8919 | GTGATGTGGGACTTGT | 80 | 571 |
| 905737 | N/A | N/A | 8968 | 8983 | AGTGTGGGAGTGCATA | 0 | 572 |

TABLE 9
Inhibition of APOL1 mRNA by 3-10-3 cEt gapmers targeting SEQ ID NO: 1 and 2

| | SEQ | SEQ | SEQ | SEQ | | | |
|---|---|---|---|---|---|---|---|
| | ID: 1 | ID: 1 | ID: 2 | ID: 2 | | | |
| Compound | Start | Stop | Start | Stop | | % | SEQ |
| Number | Site | Site | Site | Site | Sequence | inhibition | ID NO |
| 793406 | N/A | N/A | 8306 | 8321 | GTTCAAAAGCAGCATT | 83 | 13 |
| 903434 | 32 | 47 | 525 | 540 | CCAGTCCCCAAGATAT | 31 | 573 |
| 903466 | 152 | 167 | 2362 | 2377 | TCGCTGCAGGGCCTCC | 26 | 574 |
| 903498 | 261 | 276 | N/A | N/A | TTGTTGCACCCTCGCT | 61 | 575 |
| 903530 | 343 | 358 | N/A | N/A | TCTCTGGGTCCATGGT | 0 | 576 |
| 903626 | 568 | 583 | 12659 | 12674 | AGTTTCTGTACTGCTG | 58 | 577 |
| 903658 | 637 | 652 | 12728 | 12743 | CAAGGGCACGGAGCCT | 1 | 578 |
| 903690 | 678 | 693 | 12769 | 12784 | GGCGATGGTGGTGCCT | 17 | 579 |
| 903722 | 756 | 771 | 12847 | 12862 | CTCTGTGAAGGGTGCC | 39 | 580 |
| 903754 | 822 | 837 | 12913 | 12928 | AATCCCGGTCAAAGCG | 21 | 581 |
| 903786 | 858 | 873 | 12949 | 12964 | CCACCACTTCTTTCCG | 48 | 582 |
| 903818 | 966 | 981 | 13057 | 13072 | ATTGCCAGCTAAGGAA | 51 | 583 |
| 903850 | 1030 | 1045 | 13121 | 13136 | GATTGGCTCTGGCTCG | 56 | 584 |
| 903882 | 1095 | 1110 | 13186 | 13201 | GCTTTCAGCTGAGATT | 6 | 585 |
| 903914 | 1152 | 1167 | 13243 | 13258 | GACTCCTCTGCTCATT | 84 | 586 |
| 903946 | 1239 | 1254 | 13330 | 13345 | CCCCTCATGTAAGTGC | 43 | 587 |
| 903978 | 1359 | 1374 | 13450 | 13465 | GCCCTGTGGTCACAGT | 31 | 588 |
| 904010 | 1753 | 1768 | 13844 | 13859 | AAACTTTACCTCACCC | 71 | 589 |
| 904042 | 1840 | 1855 | 13931 | 13946 | TCTCCTTGCTGCACTG | 92 | 590 |
| 904074 | 1947 | 1962 | 14038 | 14053 | CCCGGCCCCCCAATAT | 0 | 591 |
| 904106 | 2346 | 2361 | 14437 | 14452 | CCAACTGTTCTAACTC | 89 | 592 |
| 904138 | 2484 | 2499 | 14575 | 14590 | ATGCCCCCAGGAGGAC | 29 | 593 |
| 904170 | 2522 | 2537 | 14613 | 14628 | CAATGACCATCATCAG | 45 | 594 |
| 904202 | 2673 | 2688 | 14764 | 14779 | TCACATACTCTCTGGG | 79 | 595 |
| 904234 | 2775 | 2790 | 14866 | 14881 | AGAGATCTGAGCTTCC | 74 | 596 |
| 904266 | 2844 | 2859 | 14935 | 14950 | GCTTGATGAGTAGGTG | 54 | 597 |
| 904298 | N/A | N/A | 2349 | 2364 | TCCTCCTTGAGCAGGA | 29 | 598 |
| 904362 | N/A | N/A | 1077 | 1092 | TGAACTCCTTGTACCT | 51 | 599 |
| 904394 | N/A | N/A | 2565 | 2580 | GTCCTCCCTGGGCGAG | 33 | 600 |
| 904426 | N/A | N/A | 3793 | 3808 | CCACATTTGAGATTAT | 88 | 601 |
| 904458 | N/A | N/A | 4457 | 4472 | CGGGCAGCCATCTGAT | 0 | 602 |
| 904490 | N/A | N/A | 4870 | 4885 | CACCCTCCATTCTAAG | 0 | 603 |
| 904522 | N/A | N/A | 5072 | 5087 | CACTTGAGTCATTTGC | 84 | 604 |
| 904554 | N/A | N/A | 5199 | 5214 | AGCGGGAGGTGACAGG | 34 | 605 |
| 904586 | N/A | N/A | 5312 | 5327 | AGGCCCGATACATTCC | 26 | 606 |
| 904618 | N/A | N/A | 5411 | 5426 | TTCTCATGGTACAGGA | 65 | 607 |
| 904650 | N/A | N/A | 5498 | 5513 | TTAGGGAGGCCCTATT | 6 | 608 |
| 904682 | N/A | N/A | 5700 | 5715 | AATTCTATTGGGCCTC | 64 | 609 |
| 904714 | N/A | N/A | 5776 | 5791 | TCACCATAGCACGAAG | 86 | 610 |
| 904746 | N/A | N/A | 5819 | 5834 | GCAGTTTCATATTCAC | 96 | 611 |
| 904778 | N/A | N/A | 5887 | 5902 | GATTTTCCAACAAGGT | 84 | 612 |
| 904810 | N/A | N/A | 5941 | 5956 | CTCACCTGTATTCGGA | 27 | 613 |
| 904842 | N/A | N/A | 6020 | 6035 | GCACTAAAAGCTGATT | 70 | 614 |
| 904874 | N/A | N/A | 6150 | 6165 | GAAATCCTTATGCTTA | 69 | 615 |
| 904906 | N/A | N/A | 6220 | 6235 | CCATGTATGCCCATGT | 79 | 616 |
| 904938 | N/A | N/A | 6271 | 6286 | CATACCCTCCTTGTCT | 21 | 617 |
| 904970 | N/A | N/A | 6339 | 6354 | AATTCAGCTAAGACCA | 77 | 618 |
| 905002 | N/A | N/A | 6411 | 6426 | AGTTGCTGAAACCACC | 68 | 619 |
| 905034 | N/A | N/A | 6550 | 6565 | ATATCAGATGGGTACT | 74 | 620 |
| 905066 | N/A | N/A | 6613 | 6628 | CGAGGCCTTTAGAACA | 19 | 621 |
| 905098 | N/A | N/A | 6716 | 6731 | GGCACTAAATCTGTGT | 0 | 622 |
| 905130 | N/A | N/A | 6802 | 6817 | GCTGGGCGAGCGATTG | 39 | 623 |
| 905162 | N/A | N/A | 6887 | 6902 | GACTTGGTTGCCGTGG | 79 | 624 |
| 905194 | N/A | N/A | 7078 | 7093 | GCCTGTTATTAAACCA | 52 | 625 |
| 905226 | N/A | N/A | 7167 | 7182 | ATCCTTGAGGCACCTC | 64 | 626 |
| 905258 | N/A | N/A | 7268 | 7283 | CTACCATGCAAAGGAG | 38 | 627 |
| 905290 | N/A | N/A | 7348 | 7363 | TGCATTCTCCCTTATA | 19 | 628 |
| 905322 | N/A | N/A | 7483 | 7498 | AGACAGCGAGAGTCAC | 1 | 629 |
| 905354 | N/A | N/A | 7851 | 7866 | AATTGTTTCTTGCCGT | 41 | 630 |
| 905386 | N/A | N/A | 7973 | 7988 | GATTACTCCTGAAGTC | 53 | 631 |
| 905418 | N/A | N/A | 8015 | 8030 | ATAATGGTAGGTCTAC | 87 | 632 |
| 905450 | N/A | N/A | 8117 | 8132 | ATATTCCTGACCATTC | 72 | 633 |
| 905482 | N/A | N/A | 8183 | 8198 | GAATCCAGATGTGTTT | 80 | 634 |
| 905514 | N/A | N/A | 8337 | 8352 | ATCAACACATCATTGG | 62 | 635 |
| 905546 | N/A | N/A | 8407 | 8422 | AGTGATCACTTCCATC | 0 | 636 |
| 905578 | N/A | N/A | 8495 | 8510 | GCCATGGTGCTTTGGA | 0 | 637 |
| 905610 | N/A | N/A | 8663 | 8678 | CTTCCATAAGCCAGCA | 48 | 638 |
| 905642 | N/A | N/A | 8754 | 8769 | TAGGGCTCTAATTCTA | 32 | 639 |
| 905674 | N/A | N/A | 8865 | 8880 | GAGGGAATTGTGTGCC | 58 | 640 |
| 905706 | N/A | N/A | 8905 | 8920 | TGTGATGTGGGACTTG | 82 | 641 |
| 905738 | N/A | N/A | 8969 | 8984 | AAGTGTGGGAGTGCAT | 0 | 642 |

TABLE 10
Inhibition of APOL1 mRNA by 3-10-3 cEt gapmers targeting SEQ ID NO: 1 and 2

| | SEQ | SEQ | SEQ | SEQ | | | |
|---|---|---|---|---|---|---|---|
| | ID: 1 | ID: 1 | ID: 2 | ID: 2 | | | |
| Compound | Start | Stop | Start | Stop | | % | SEQ |
| Number | Site | Site | Site | Site | Sequence | inhibition | ID NO |
| 793406 | N/A | N/A | 8306 | 8321 | GTTCAAAAGCAGCATT | 84 | 13 |
| 903435 | 39 | 54 | 532 | 547 | AGGTCCTCCAGTCCCC | 0 | 643 |
| 903467 | 153 | 168 | 2363 | 2378 | GTCGCTGCAGGGCCTC | 4 | 644 |
| 903499 | 262 | 277 | N/A | N/A | TTTGTTGCACCCTCGC | 91 | 645 |
| 903531 | 345 | 360 | N/A | N/A | GCTCTCTGGGTCCATG | 8 | 646 |
| 903627 | 569 | 584 | 12660 | 12675 | CAGTTTCTGTACTGCT | 14 | 647 |
| 903659 | 638 | 653 | 12729 | 12744 | GCAAGGGCACGGAGCC | 0 | 648 |
| 903691 | 679 | 694 | 12770 | 12785 | TGGCGATGGTGGTGCC | 0 | 649 |
| 903723 | 757 | 772 | 12848 | 12863 | CCTCTGTGAAGGGTGC | 24 | 650 |
| 903755 | 823 | 838 | 12914 | 12929 | TAATCCCGGTCAAAGC | 18 | 651 |
| 903787 | 861 | 876 | 12952 | 12967 | TGTCCACCACTTCTTT | 49 | 652 |
| 903819 | 967 | 982 | 13058 | 13073 | TATTGCCAGCTAAGGA | 33 | 653 |
| 903851 | 1031 | 1046 | 13122 | 13137 | AGATTGGCTCTGGCTC | 87 | 654 |
| 903883 | 1096 | 1111 | 13187 | 13202 | CGCTTTCAGCTGAGAT | 0 | 655 |
| 903915 | 1156 | 1171 | 13247 | 13262 | GCTTGACTCCTCTGCT | 6 | 656 |
| 903947 | 1240 | 1255 | 13331 | 13346 | CCCCCTCATGTAAGTG | 25 | 657 |
| 903979 | 1380 | 1395 | 13471 | 13486 | ATCTCTCCTGGTGGCT | 82 | 658 |
| 904011 | 1754 | 1769 | 13845 | 13860 | TAAACTTTACCTCACC | 65 | 659 |
| 904043 | 1841 | 1856 | 13932 | 13947 | TTCTCCTTGCTGCACT | 89 | 660 |
| 904075 | 1948 | 1963 | 14039 | 14054 | ACCCGGCCCCCCAATA | 13 | 661 |
| 904107 | 2347 | 2362 | 14438 | 14453 | TCCAACTGTTCTAACT | 66 | 662 |
| 904139 | 2485 | 2500 | 14576 | 14591 | TATGCCCCCAGGAGGA | 24 | 663 |
| 904171 | 2525 | 2540 | 14616 | 14631 | CCCCAATGACCATCAT | 27 | 664 |
| 904203 | 2678 | 2693 | 14769 | 14784 | GGTTCTCACATACTCT | 96 | 665 |
| 904235 | 2776 | 2791 | 14867 | 14882 | TAGAGATCTGAGCTTC | 43 | 666 |
| 904267 | 2845 | 2860 | 14936 | 14951 | AGCTTGATGAGTAGGT | 0 | 667 |
| 904299 | N/A | N/A | 2352 | 2367 | GCCTCCTCCTTGAGCA | 0 | 668 |
| 904363 | N/A | N/A | 1086 | 1101 | GATGACCTCTGAACTC | 65 | 669 |
| 904395 | N/A | N/A | 2566 | 2581 | GGTCCTCCCTGGGCGA | 7 | 670 |
| 904427 | N/A | N/A | 3795 | 3810 | GCCCACATTTGAGATT | 23 | 671 |
| 904459 | N/A | N/A | 4461 | 4476 | AGGACGGGCAGCCATC | 9 | 672 |
| 904491 | N/A | N/A | 4871 | 4886 | CCACCCTCCATTCTAA | 11 | 673 |
| 904523 | N/A | N/A | 5073 | 5088 | CCACTTGAGTCATTTG | 89 | 674 |
| 904555 | N/A | N/A | 5200 | 5215 | GAGCGGGAGGTGACAG | 16 | 675 |
| 904587 | N/A | N/A | 5313 | 5328 | CAGGCCCGATACATTC | 8 | 676 |
| 904619 | N/A | N/A | 5412 | 5427 | ATTCTCATGGTACAGG | 92 | 677 |
| 904651 | N/A | N/A | 5499 | 5514 | CTTAGGGAGGCCCTAT | 3 | 678 |
| 904683 | N/A | N/A | 5701 | 5716 | AAATTCTATTGGGCCT | 19 | 679 |
| 904715 | N/A | N/A | 5777 | 5792 | TTCACCATAGCACGAA | 24 | 680 |
| 904747 | N/A | N/A | 5826 | 5841 | CCTTACTGCAGTTTCA | 91 | 681 |
| 904779 | N/A | N/A | 5889 | 5904 | GGGATTTTCCAACAAG | 42 | 682 |
| 904811 | N/A | N/A | 5942 | 5957 | TCTCACCTGTATTCGG | 28 | 683 |
| 904843 | N/A | N/A | 6021 | 6036 | TGCACTAAAAGCTGAT | 21 | 684 |
| 904875 | N/A | N/A | 6152 | 6167 | CAGAAATCCTTATGCT | 25 | 685 |
| 904907 | N/A | N/A | 6221 | 6236 | TCCATGTATGCCCATG | 77 | 686 |
| 904939 | N/A | N/A | 6279 | 6294 | CACTCAATCATACCCT | 43 | 687 |
| 904971 | N/A | N/A | 6340 | 6355 | CAATTCAGCTAAGACC | 54 | 688 |
| 905003 | N/A | N/A | 6413 | 6428 | GGAGTTGCTGAAACCA | 35 | 689 |
| 905035 | N/A | N/A | 6551 | 6566 | CATATCAGATGGGTAC | 65 | 690 |
| 905067 | N/A | N/A | 6614 | 6629 | ACGAGGCCTTTAGAAC | 49 | 691 |
| 905099 | N/A | N/A | 6720 | 6735 | CTCTGGCACTAAATCT | 38 | 692 |
| 905131 | N/A | N/A | 6803 | 6818 | GGCTGGGCGAGCGATT | 44 | 693 |
| 905163 | N/A | N/A | 6888 | 6903 | TGACTTGGTTGCCGTG | 67 | 694 |
| 905195 | N/A | N/A | 7079 | 7094 | GGCCTGTTATTAAACC | 2 | 695 |
| 905227 | N/A | N/A | 7168 | 7183 | GATCCTTGAGGCACCT | 4 | 696 |
| 905259 | N/A | N/A | 7269 | 7284 | ACTACCATGCAAAGGA | 38 | 697 |
| 905291 | N/A | N/A | 7379 | 7394 | CTCCTTATGTTTTGAA | 81 | 698 |
| 905323 | N/A | N/A | 7484 | 7499 | CAGACAGCGAGAGTCA | 22 | 699 |
| 905355 | N/A | N/A | 7852 | 7867 | AAATTGTTTCTTGCCG | 46 | 700 |
| 905387 | N/A | N/A | 7974 | 7989 | GGATTACTCCTGAAGT | 33 | 701 |
| 905419 | N/A | N/A | 8016 | 8031 | AATAATGGTAGGTCTA | 82 | 702 |
| 905451 | N/A | N/A | 8118 | 8133 | TATATTCCTGACCATT | 63 | 703 |
| 905483 | N/A | N/A | 8184 | 8199 | GGAATCCAGATGTGTT | 86 | 704 |
| 905515 | N/A | N/A | 8338 | 8353 | TATCAACACATCATTG | 37 | 705 |
| 905547 | N/A | N/A | 8408 | 8423 | CAGTGATCACTTCCAT | 38 | 706 |
| 905579 | N/A | N/A | 8516 | 8531 | ACATTGAAACACCAGG | 92 | 707 |
| 905611 | N/A | N/A | 8664 | 8679 | GCTTCCATAAGCCAGC | 35 | 708 |
| 905643 | N/A | N/A | 8755 | 8770 | GTAGGGCTCTAATTCT | 56 | 709 |
| 905675 | N/A | N/A | 8866 | 8881 | AGAGGGAATTGTGTGC | 78 | 710 |
| 905707 | N/A | N/A | 8906 | 8921 | CTGTGATGTGGGACTT | 91 | 711 |
| 905739 | N/A | N/A | 8970 | 8985 | AAAGTGTGGGAGTGCA | 0 | 712 |

TABLE 11
Inhibition of APOL1 mRNA by 3-10-3 cEt gapmers targeting SEQ ID NO: 1 and 2

| | SEQ | SEQ | SEQ | SEQ | | | |
|---|---|---|---|---|---|---|---|
| | ID: 1 | ID: 1 | ID: 2 | ID: 2 | | | |
| Compound | Start | Stop | Start | Stop | | % | SEQ |
| Number | Site | Site | Site | Site | Sequence | inhibition | ID NO |
| 793406 | N/A | N/A | 8306 | 8321 | GTTCAAAAGCAGCATT | 93 | 13 |
| 903414 | 12 | 27 | 505 | 520 | AGGAATTCGAAAGGGA | 0 | 713 |
| 903446 | 52 | 67 | 545 | 560 | ATAATAACCAGACAGG | 48 | 714 |
| 903478 | 206 | 221 | N/A | N/A | GCACTCATCCAGATGC | 29 | 715 |
| 903510 | 288 | 303 | 4763 | 4778 | TCCAGTATCTGTCCCA | 57 | 716 |
| 903542 | 397 | 412 | 9060 | 9075 | GTGTGCTCACTTTTTC | 91 | 717 |
| 903638 | 615 | 630 | 12706 | 12721 | GTTATCCTCAAGCTCA | 81 | 718 |
| 903670 | 656 | 671 | 12747 | 12762 | ACCTTCTGAACCCCAT | 85 | 719 |
| 903702 | 729 | 744 | 12820 | 12835 | GACGAGGGTCAGGATG | 51 | 720 |
| 903734 | 789 | 804 | 12880 | 12895 | CATCCCAGGTTCCAAG | 63 | 721 |
| 903766 | 836 | 851 | 12927 | 12942 | ATGGTACTGCTGGTAA | 76 | 722 |
| 903798 | 873 | 888 | 12964 | 12979 | GGCTTGGGCTTGTGTC | 57 | 723 |
| 903830 | 982 | 997 | 13073 | 13088 | GTGTGAGTTGGTAAGT | 98 | 724 |
| 903862 | 1047 | 1062 | 13138 | 13153 | ATGCGGTACTGACTGA | 92 | 725 |
| 903894 | 1107 | 1122 | 13198 | 13213 | CACCTGTTCACCGCTT | 94 | 726 |
| 903926 | 1169 | 1184 | 13260 | 13275 | GCCACATCCGTGAGCT | 25 | 727 |
| 903958 | 1333 | 1348 | 13424 | 13439 | CCTGCAGAATCTTATA | 0 | 728 |
| 903990 | 1393 | 1408 | 13484 | 13499 | CCCTGCCAGGCATATC | 20 | 729 |
| 904022 | 1779 | 1794 | 13870 | 13885 | CCAAAGTCCCTAACAC | 74 | 730 |
| 904054 | 1866 | 1881 | 13957 | 13972 | TATTGCAGGCTCCAAT | 18 | 731 |
| 904086 | 2256 | 2271 | 14347 | 14362 | TCTTCCGTCAATATAT | 79 | 732 |
| 904118 | 2383 | 2398 | 14474 | 14489 | TGGGTCTGTAGTGGAG | 76 | 733 |
| 904150 | 2498 | 2513 | 14589 | 14604 | TGCCTGACTGAGATAT | 64 | 734 |
| 904182 | 2542 | 2557 | 14633 | 14648 | CCATCACATGACAACC | 83 | 735 |
| 904214 | 2712 | 2727 | 14803 | 14818 | CCGGGTAAGAGCGATG | 29 | 736 |
| 904246 | 2793 | 2808 | 14884 | 14899 | CGGCGACAAGACAGCT | 53 | 737 |
| 904278 | N/A | N/A | 448 | 463 | AGCAAACACGCTCCCC | 32 | 738 |
| 904310 | N/A | N/A | 1333 | 1348 | GCAACGCACCCTTCTC | 67 | 739 |
| 904374 | N/A | N/A | 1715 | 1730 | ACAGGCTTCATCATCT | 72 | 740 |
| 904406 | N/A | N/A | 2624 | 2639 | AGCCTCTGCTGAATAT | 25 | 741 |
| 904438 | N/A | N/A | 3956 | 3971 | GATCTTGCCAGATGCC | 38 | 742 |
| 904470 | N/A | N/A | 4584 | 4599 | ATCACTGAGCCCCCAT | 55 | 743 |
| 904502 | N/A | N/A | 5016 | 5031 | TCACCCTAAGGAGAGG | 68 | 744 |
| 904534 | N/A | N/A | 5095 | 5110 | ACTTCCCCAAGGATGT | 25 | 745 |
| 904566 | N/A | N/A | 5217 | 5232 | AGGGTCAGCTTGGAGC | 73 | 746 |
| 904598 | N/A | N/A | 5332 | 5347 | GTTAAGCTGGAAGCTG | 41 | 747 |
| 904630 | N/A | N/A | 5455 | 5470 | AGCCGTGTTATATTTG | 88 | 748 |
| 904662 | N/A | N/A | 5580 | 5595 | TGCCCTAACACAGCTG | 8 | 749 |
| 904694 | N/A | N/A | 5742 | 5757 | TTCCCAATTCAGCAAT | 54 | 750 |
| 904726 | N/A | N/A | 5793 | 5808 | TTGTCTCCGACACTTT | 43 | 751 |
| 904758 | N/A | N/A | 5849 | 5864 | AAGTGCAACCAATCAA | 94 | 752 |
| 904790 | N/A | N/A | 5918 | 5933 | CTAAACTCACACTGGC | 67 | 753 |
| 904822 | N/A | N/A | 5953 | 5968 | CTAAGTTCCGGTCTCA | 87 | 754 |
| 904854 | N/A | N/A | 6090 | 6105 | ACTCCACTGGGCCCGA | 16 | 755 |
| 904886 | N/A | N/A | 6191 | 6206 | GCATTGCCCTCCCAAT | 57 | 756 |
| 904918 | N/A | N/A | 6233 | 6248 | CACCACAGCCGTTCCA | 26 | 757 |
| 904950 | N/A | N/A | 6305 | 6320 | CTGGGTCTGACCCACG | 0 | 758 |
| 904982 | N/A | N/A | 6366 | 6381 | CAGGATCCTGACAAAC | 0 | 759 |
| 905014 | N/A | N/A | 6437 | 6452 | CAGGTTCACATGACAG | 77 | 760 |
| 905046 | N/A | N/A | 6582 | 6597 | AACTGCAAGCTATGGG | 91 | 761 |
| 905078 | N/A | N/A | 6628 | 6643 | GACAGGCAATACCTAC | 6 | 762 |
| 905110 | N/A | N/A | 6733 | 6748 | GGATGGAAGGAACCTC | 91 | 763 |
| 905142 | N/A | N/A | 6821 | 6836 | TGAACGCAATGCTGAC | 97 | 764 |
| 905174 | N/A | N/A | 6981 | 6996 | GCTCTCGGCTTCTAAT | 21 | 765 |
| 905206 | N/A | N/A | 7111 | 7126 | CGGCTCTCCACTGTCA | 46 | 766 |
| 905238 | N/A | N/A | 7232 | 7247 | GCACTCTCAGATGGGC | 20 | 767 |
| 905270 | N/A | N/A | 7284 | 7299 | ACAGCATTGAGTACAA | 96 | 768 |
| 905302 | N/A | N/A | 7456 | 7471 | ATCAAGCAGGAAGCTC | 70 | 769 |
| 905334 | N/A | N/A | 7527 | 7542 | CCGGCCACCTCATTCT | 16 | 770 |
| 905366 | N/A | N/A | 7889 | 7904 | CCAGTATGTATTTGTG | 52 | 771 |
| 905398 | N/A | N/A | 7986 | 8001 | CAGTACAGAGCAGGAT | 96 | 772 |
| 905430 | N/A | N/A | 8064 | 8079 | CACATGTTTCAACAGT | 78 | 773 |
| 905462 | N/A | N/A | 8145 | 8160 | TTTAGAAAGGACACGG | 94 | 774 |
| 905494 | N/A | N/A | 8268 | 8283 | AATATCAGAGTGTACC | 94 | 775 |
| 905526 | N/A | N/A | 8373 | 8388 | TCAAACACTTTATACC | 63 | 776 |
| 905558 | N/A | N/A | 8424 | 8439 | GGAAGTGGAAACATCC | 50 | 777 |
| 905590 | N/A | N/A | 8561 | 8576 | GTTGAAGTCACCCAGC | 48 | 778 |
| 905622 | N/A | N/A | 8692 | 8707 | GACTGTGTGAGCACAC | 25 | 779 |
| 905654 | N/A | N/A | 8809 | 8824 | CATTTGGAGATCTGGC | 90 | 780 |
| 905686 | N/A | N/A | 8877 | 8892 | ATTAGTGCTATAGAGG | 87 | 781 |
| 905718 | N/A | N/A | 8945 | 8960 | TTGCATAAGAGATGAC | 84 | 782 |

TABLE 12
Inhibition of APOL1 mRNA by 3-10-3 cEt gapmers targeting SEQ ID NO: 1 and 2

| | SEQ | SEQ | SEQ | SEQ | | | |
|---|---|---|---|---|---|---|---|
| | ID: 1 | ID: 1 | ID: 2 | ID: 2 | | | |
| Compound | Start | Stop | Start | Stop | | % | SEQ |
| Number | Site | Site | Site | Site | Sequence | inhibition | ID NO |
| 793406 | N/A | N/A | 8306 | 8321 | GTTCAAAAGCAGCATT | 89 | 13 |
| 903415 | 13 | 28 | 506 | 521 | GAGGAATTCGAAAGGG | 47 | 783 |
| 903447 | 54 | 69 | 547 | 562 | GTATAATAACCAGACA | 30 | 784 |
| 903479 | 207 | 222 | N/A | N/A | TGCACTCATCCAGATG | 15 | 785 |
| 903511 | 289 | 304 | 4764 | 4779 | CTCCAGTATCTGTCCC | 70 | 786 |
| 903671 | 658 | 673 | 12749 | 12764 | GGACCTTCTGAACCCC | 20 | 787 |
| 903703 | 730 | 745 | 12821 | 12836 | CGACGAGGGTCAGGAT | 53 | 788 |
| 903735 | 790 | 805 | 12881 | 12896 | CCATCCCAGGTTCCAA | 51 | 789 |
| 903767 | 837 | 852 | 12928 | 12943 | CATGGTACTGCTGGTA | 83 | 790 |
| 903799 | 891 | 906 | 12982 | 12997 | TTTGATGACCAGGTCG | 74 | 791 |
| 903831 | 983 | 998 | 13074 | 13089 | CGTGTGAGTTGGTAAG | 86 | 792 |
| 903863 | 1048 | 1063 | 13139 | 13154 | CATGCGGTACTGACTG | 44 | 793 |
| 903895 | 1108 | 1123 | 13199 | 13214 | CCACCTGTTCACCGCT | 92 | 794 |
| 903927 | 1171 | 1186 | 13262 | 13277 | GGGCCACATCCGTGAG | 0 | 795 |
| 904023 | 1780 | 1795 | 13871 | 13886 | GCCAAAGTCCCTAACA | 87 | 796 |
| 904087 | 2257 | 2272 | 14348 | 14363 | TTCTTCCGTCAATATA | 91 | 797 |
| 904119 | 2385 | 2400 | 14476 | 14491 | GCTGGGTCTGTAGTGG | 88 | 798 |
| 904151 | 2499 | 2514 | 14590 | 14605 | CTGCCTGACTGAGATA | 86 | 799 |
| 904183 | 2543 | 2558 | 14634 | 14649 | CCCATCACATGACAAC | 85 | 800 |
| 904215 | 2713 | 2728 | 14804 | 14819 | ACCGGGTAAGAGCGAT | 76 | 801 |
| 904247 | 2794 | 2809 | 14885 | 14900 | GCGGCGACAAGACAGC | 24 | 802 |
| 904311 | N/A | N/A | 1336 | 1351 | TCTGCAACGCACCCTT | 54 | 803 |
| 904343 | N/A | N/A | 631 | 646 | TTACCAAGGAATCTTC | 42 | 804 |
| 904375 | N/A | N/A | 1885 | 1900 | CGCCTCCTTCAACCTT | 68 | 805 |
| 904407 | N/A | N/A | 2637 | 2652 | GACCCTGACCTGGAGC | 48 | 806 |
| 904439 | N/A | N/A | 4015 | 4030 | GCACTGGACAGCCTGT | 41 | 807 |
| 904471 | N/A | N/A | 4590 | 4605 | TTGTCTATCACTGAGC | 66 | 808 |
| 904503 | N/A | N/A | 5017 | 5032 | GTCACCCTAAGGAGAG | 40 | 809 |
| 904535 | N/A | N/A | 5104 | 5119 | GCTGATTCCACTTCCC | 66 | 810 |
| 904567 | N/A | N/A | 5221 | 5236 | CCCCAGGGTCAGCTTG | 48 | 811 |
| 904599 | N/A | N/A | 5333 | 5348 | AGTTAAGCTGGAAGCT | 18 | 812 |
| 904631 | N/A | N/A | 5456 | 5471 | TAGCCGTGTTATATTT | 73 | 813 |
| 904663 | N/A | N/A | 5650 | 5665 | TGAACTCAGCCCCTGC | 43 | 814 |
| 904695 | N/A | N/A | 5743 | 5758 | TTTCCCAATTCAGCAA | 63 | 815 |
| 904727 | N/A | N/A | 5794 | 5809 | CTTGTCTCCGACACTT | 81 | 816 |
| 904759 | N/A | N/A | 5850 | 5865 | TAAGTGCAACCAATCA | 92 | 817 |
| 904791 | N/A | N/A | 5919 | 5934 | CCTAAACTCACACTGG | 47 | 818 |
| 904823 | N/A | N/A | 5954 | 5969 | GCTAAGTTCCGGTCTC | 87 | 819 |
| 904855 | N/A | N/A | 6091 | 6106 | AACTCCACTGGGCCCG | 0 | 820 |
| 904887 | N/A | N/A | 6194 | 6209 | ACTGCATTGCCCTCCC | 80 | 821 |
| 904919 | N/A | N/A | 6234 | 6249 | GCACCACAGCCGTTCC | 37 | 822 |
| 904983 | N/A | N/A | 6367 | 6382 | ACAGGATCCTGACAAA | 8 | 823 |
| 905047 | N/A | N/A | 6583 | 6598 | AAACTGCAAGCTATGG | 71 | 824 |
| 905079 | N/A | N/A | 6630 | 6645 | TGGACAGGCAATACCT | 1 | 825 |
| 905143 | N/A | N/A | 6822 | 6837 | ATGAACGCAATGCTGA | 96 | 826 |
| 905175 | N/A | N/A | 6982 | 6997 | TGCTCTCGGCTTCTAA | 65 | 827 |
| 905207 | N/A | N/A | 7112 | 7127 | ACGGCTCTCCACTGTC | 58 | 828 |
| 905239 | N/A | N/A | 7233 | 7248 | GGCACTCTCAGATGGG | 13 | 829 |
| 905271 | N/A | N/A | 7285 | 7300 | CACAGCATTGAGTACA | 88 | 830 |
| 905303 | N/A | N/A | 7459 | 7474 | ACCATCAAGCAGGAAG | 90 | 831 |
| 905335 | N/A | N/A | 7528 | 7543 | CCCGGCCACCTCATTC | 0 | 832 |
| 905367 | N/A | N/A | 7890 | 7905 | ACCAGTATGTATTTGT | 75 | 833 |
| 905399 | N/A | N/A | 7987 | 8002 | TCAGTACAGAGCAGGA | 96 | 834 |
| 905431 | N/A | N/A | 8065 | 8080 | ACACATGTTTCAACAG | 70 | 835 |
| 905463 | N/A | N/A | 8146 | 8161 | TTTTAGAAAGGACACG | 93 | 836 |
| 905495 | N/A | N/A | 8269 | 8284 | AAATATCAGAGTGTAC | 75 | 837 |
| 905527 | N/A | N/A | 8374 | 8389 | GTCAAACACTTTATAC | 52 | 838 |
| 905559 | N/A | N/A | 8442 | 8457 | GTGAGCCTTCCAGGCC | 0 | 839 |
| 905591 | N/A | N/A | 8564 | 8579 | GATGTTGAAGTCACCC | 60 | 840 |
| 905623 | N/A | N/A | 8694 | 8709 | AAGACTGTGTGAGCAC | 54 | 841 |
| 905655 | N/A | N/A | 8811 | 8826 | TACATTTGGAGATCTG | 95 | 842 |
| 905687 | N/A | N/A | 8878 | 8893 | CATTAGTGCTATAGAG | 76 | 843 |
| 905719 | N/A | N/A | 8946 | 8961 | ATTGCATAAGAGATGA | 83 | 844 |

TABLE 13
Inhibition of APOL1 mRNA by 3-10-3 cEt gapmers targeting SEQ ID NO: 1 and 2

| | SEQ | SEQ | SEQ | SEQ | | | |
|---|---|---|---|---|---|---|---|
| | ID: 1 | ID: 1 | ID: 2 | ID: 2 | | | |
| Compound | Start | Stop | Start | Stop | | % | SEQ |
| Number | Site | Site | Site | Site | Sequence | inhibition | ID NO |
| 793406 | N/A | N/A | 8306 | 8321 | GTTCAAAAGCAGCATT | 79 | 13 |
| 903416 | 14 | 29 | 507 | 522 | CGAGGAATTCGAAAGG | 22 | 845 |
| 903448 | 55 | 70 | 548 | 563 | TGTATAATAACCAGAC | 27 | 846 |
| 903480 | 208 | 223 | N/A | N/A | GTGCACTCATCCAGAT | 0 | 847 |
| 903512 | 291 | 306 | 4766 | 4781 | ATCTCCAGTATCTGTC | 20 | 848 |
| 903544 | 403 | 418 | 9066 | 9081 | GATTCTGTGTGCTCAC | 90 | 849 |
| 903640 | 617 | 632 | 12708 | 12723 | ATGTTATCCTCAAGCT | 47 | 850 |
| 903672 | 659 | 674 | 12750 | 12765 | TGGACCTTCTGAACCC | 6 | 851 |
| 903704 | 731 | 746 | 12822 | 12837 | CCGACGAGGGTCAGGA | 25 | 852 |
| 903736 | 793 | 808 | 12884 | 12899 | ACTCCATCCCAGGTTC | 20 | 853 |
| 903768 | 838 | 853 | 12929 | 12944 | CCATGGTACTGCTGGT | 0 | 854 |
| 903800 | 892 | 907 | 12983 | 12998 | TTTTGATGACCAGGTC | 57 | 855 |
| 903832 | 997 | 1012 | 13088 | 13103 | CCTTCCCAATGCCTCG | 78 | 856 |
| 903864 | 1049 | 1064 | 13140 | 13155 | GCATGCGGTACTGACT | 4 | 857 |
| 903896 | 1109 | 1124 | 13200 | 13215 | TCCACCTGTTCACCGC | 78 | 858 |
| 903928 | 1200 | 1215 | 13291 | 13306 | TACATCCAGCACAAGA | 72 | 859 |
| 903960 | 1335 | 1350 | 13426 | 13441 | CGCCTGCAGAATCTTA | 63 | 860 |
| 903992 | 1395 | 1410 | 13486 | 13501 | GCCCCTGCCAGGCATA | 20 | 861 |
| 904024 | 1781 | 1796 | 13872 | 13887 | TGCCAAAGTCCCTAAC | 83 | 862 |
| 904056 | 1872 | 1887 | 13963 | 13978 | TTCCCTTATTGCAGGC | 77 | 863 |
| 904088 | 2258 | 2273 | 14349 | 14364 | ATTCTTCCGTCAATAT | 77 | 864 |
| 904120 | 2386 | 2401 | 14477 | 14492 | GGCTGGGTCTGTAGTG | 66 | 865 |
| 904152 | 2500 | 2515 | 14591 | 14606 | GCTGCCTGACTGAGAT | 33 | 866 |
| 904184 | 2544 | 2559 | 14635 | 14650 | ACCCATCACATGACAA | 80 | 867 |
| 904216 | 2714 | 2729 | 14805 | 14820 | TACCGGGTAAGAGCGA | 84 | 868 |
| 904248 | 2795 | 2810 | 14886 | 14901 | GGCGGCGACAAGACAG | 58 | 869 |
| 904280 | N/A | N/A | 450 | 465 | ACAGCAAACACGCTCC | 18 | 870 |
| 904312 | N/A | N/A | 1338 | 1353 | ATTCTGCAACGCACCC | 61 | 871 |
| 904344 | N/A | N/A | 642 | 657 | CTGTCCCCAACTTACC | 7 | 872 |
| 904376 | N/A | N/A | 1887 | 1902 | TCCGCCTCCTTCAACC | 45 | 873 |
| 904408 | N/A | N/A | 2680 | 2695 | CACCCTGGATCCCATC | 26 | 874 |
| 904440 | N/A | N/A | 4044 | 4059 | CTCTTCATCTTGGTGA | 69 | 875 |
| 904472 | N/A | N/A | 4599 | 4614 | CCAGATTGTTTGTCTA | 62 | 876 |
| 904504 | N/A | N/A | 5018 | 5033 | TGTCACCCTAAGGAGA | 36 | 877 |
| 904536 | N/A | N/A | 5105 | 5120 | CGCTGATTCCACTTCC | 17 | 878 |
| 904568 | N/A | N/A | 5222 | 5237 | ACCCCAGGGTCAGCTT | 25 | 879 |
| 904600 | N/A | N/A | 5334 | 5349 | CAGTTAAGCTGGAAGC | 18 | 880 |
| 904632 | N/A | N/A | 5457 | 5472 | GTAGCCGTGTTATATT | 73 | 881 |
| 904664 | N/A | N/A | 5652 | 5667 | ACTGAACTCAGCCCCT | 50 | 882 |
| 904696 | N/A | N/A | 5744 | 5759 | GTTTCCCAATTCAGCA | 64 | 883 |
| 904728 | N/A | N/A | 5795 | 5810 | CCTTGTCTCCGACACT | 88 | 884 |
| 904760 | N/A | N/A | 5851 | 5866 | GTAAGTGCAACCAATC | 98 | 885 |
| 904792 | N/A | N/A | 5920 | 5935 | CCCTAAACTCACACTG | 28 | 886 |
| 904824 | N/A | N/A | 5955 | 5970 | GGCTAAGTTCCGGTCT | 48 | 887 |
| 904856 | N/A | N/A | 6092 | 6107 | AAACTCCACTGGGCCC | 9 | 888 |
| 904888 | N/A | N/A | 6195 | 6210 | AACTGCATTGCCCTCC | 72 | 889 |
| 904920 | N/A | N/A | 6236 | 6251 | CCGCACCACAGCCGTT | 26 | 890 |
| 904952 | N/A | N/A | 6307 | 6322 | CGCTGGGTCTGACCCA | 22 | 891 |
| 904984 | N/A | N/A | 6368 | 6383 | CACAGGATCCTGACAA | 0 | 892 |
| 905016 | N/A | N/A | 6439 | 6454 | AGCAGGTTCACATGAC | 78 | 893 |
| 905048 | N/A | N/A | 6587 | 6602 | CCTGAAACTGCAAGCT | 41 | 894 |
| 905080 | N/A | N/A | 6631 | 6646 | CTGGACAGGCAATACC | 24 | 895 |
| 905112 | N/A | N/A | 6735 | 6750 | TTGGATGGAAGGAACC | 75 | 896 |
| 905144 | N/A | N/A | 6823 | 6838 | AATGAACGCAATGCTG | 83 | 897 |
| 905176 | N/A | N/A | 6983 | 6998 | GTGCTCTCGGCTTCTA | 59 | 898 |
| 905208 | N/A | N/A | 7113 | 7128 | CACGGCTCTCCACTGT | 30 | 899 |
| 905240 | N/A | N/A | 7234 | 7249 | GGGCACTCTCAGATGG | 44 | 900 |
| 905272 | N/A | N/A | 7286 | 7301 | CCACAGCATTGAGTAC | 58 | 901 |
| 905304 | N/A | N/A | 7460 | 7475 | AACCATCAAGCAGGAA | 70 | 902 |
| 905336 | N/A | N/A | 7532 | 7547 | AGTGCCCGGCCACCTC | 37 | 903 |
| 905368 | N/A | N/A | 7892 | 7907 | GGACCAGTATGTATTT | 34 | 904 |
| 905400 | N/A | N/A | 7988 | 8003 | GTCAGTACAGAGCAGG | 96 | 905 |
| 905432 | N/A | N/A | 8066 | 8081 | CACACATGTTTCAACA | 48 | 906 |
| 905464 | N/A | N/A | 8156 | 8171 | ATTTCCACTATTTTAG | 59 | 907 |
| 905496 | N/A | N/A | 8271 | 8286 | GAAAATATCAGAGTGT | 94 | 908 |
| 905528 | N/A | N/A | 8375 | 8390 | GGTCAAACACTTTATA | 58 | 909 |
| 905560 | N/A | N/A | 8443 | 8458 | AGTGAGCCTTCCAGGC | 11 | 910 |
| 905592 | N/A | N/A | 8565 | 8580 | AGATGTTGAAGTCACC | 67 | 911 |
| 905624 | N/A | N/A | 8704 | 8719 | GGGACACAAGAAGACT | 23 | 912 |
| 905656 | N/A | N/A | 8812 | 8827 | CTACATTTGGAGATCT | 62 | 913 |
| 905688 | N/A | N/A | 8879 | 8894 | TCATTAGTGCTATAGA | 91 | 914 |
| 905720 | N/A | N/A | 8947 | 8962 | CATTGCATAAGAGATG | 19 | 915 |

TABLE 14
Inhibition of APOL1 mRNA by 3-10-3 cEt gapmers targeting SEQ ID NO: 1 and 2

| | SEQ | SEQ | SEQ | SEQ | | | |
|---|---|---|---|---|---|---|---|
| | ID: 1 | ID: 1 | ID: 2 | ID: 2 | | | |
| Compound | Start | Stop | Start | Stop | | % | SEQ |
| Number | Site | Site | Site | Site | Sequence | inhibition | ID NO |
| 793406 | N/A | N/A | 8306 | 8321 | GTTCAAAAGCAGCATT | 82 | 13 |
| 903417 | 15 | 30 | 508 | 523 | CCGAGGAATTCGAAAG | 12 | 916 |
| 903449 | 56 | 71 | 549 | 564 | CTGTATAATAACCAGA | 47 | 917 |
| 903481 | 209 | 224 | N/A | N/A | AGTGCACTCATCCAGA | 0 | 918 |
| 903513 | 292 | 307 | 4767 | 4782 | GATCTCCAGTATCTGT | 28 | 919 |
| 903641 | 618 | 633 | 12709 | 12724 | TATGTTATCCTCAAGC | 52 | 920 |
| 903673 | 660 | 675 | 12751 | 12766 | GTGGACCTTCTGAACC | 0 | 921 |
| 903705 | 732 | 747 | 12823 | 12838 | GCCGACGAGGGTCAGG | 11 | 922 |
| 903737 | 794 | 809 | 12885 | 12900 | AACTCCATCCCAGGTT | 0 | 923 |
| 903769 | 839 | 854 | 12930 | 12945 | TCCATGGTACTGCTGG | 0 | 924 |
| 903801 | 893 | 908 | 12984 | 12999 | CTTTTGATGACCAGGT | 60 | 925 |
| 903833 | 999 | 1014 | 13090 | 13105 | GTCCTTCCCAATGCCT | 28 | 926 |
| 903865 | 1050 | 1065 | 13141 | 13156 | GGCATGCGGTACTGAC | 37 | 927 |
| 903897 | 1110 | 1125 | 13201 | 13216 | CTCCACCTGTTCACCG | 57 | 928 |
| 903929 | 1201 | 1216 | 13292 | 13307 | CTACATCCAGCACAAG | 72 | 929 |
| 903961 | 1336 | 1351 | 13427 | 13442 | CCGCCTGCAGAATCTT | 91 | 930 |
| 903993 | 1405 | 1420 | 13496 | 13511 | TTTTGTCCTGGCCCCT | 83 | 931 |
| 904025 | 1782 | 1797 | 13873 | 13888 | ATGCCAAAGTCCCTAA | 96 | 932 |
| 904057 | 1873 | 1888 | 13964 | 13979 | TTTCCCTTATTGCAGG | 77 | 933 |
| 904089 | 2259 | 2274 | 14350 | 14365 | TATTCTTCCGTCAATA | 50 | 934 |
| 904121 | 2401 | 2416 | 14492 | 14507 | GGACATTGAACCTGGG | 86 | 935 |
| 904153 | 2501 | 2516 | 14592 | 14607 | CGCTGCCTGACTGAGA | 58 | 936 |
| 904185 | 2545 | 2560 | 14636 | 14651 | GACCCATCACATGACA | 59 | 937 |
| 904217 | 2715 | 2730 | 14806 | 14821 | TTACCGGGTAAGAGCG | 76 | 938 |
| 904249 | 2796 | 2811 | 14887 | 14902 | GGGCGGCGACAAGACA | 82 | 939 |
| 904281 | N/A | N/A | 451 | 466 | CACAGCAAACACGCTC | 30 | 940 |
| 904313 | N/A | N/A | 1339 | 1354 | CATTCTGCAACGCACC | 54 | 941 |
| 904345 | N/A | N/A | 651 | 666 | GCAGGTCAACTGTCCC | 0 | 942 |
| 904377 | N/A | N/A | 1888 | 1903 | ATCCGCCTCCTTCAAC | 17 | 943 |
| 904409 | N/A | N/A | 2706 | 2721 | ATTCCCCCGACACTTG | 62 | 944 |
| 904441 | N/A | N/A | 4045 | 4060 | ACTCTTCATCTTGGTG | 73 | 945 |
| 904473 | N/A | N/A | 4607 | 4622 | AACCTAAACCAGATTG | 0 | 946 |
| 904505 | N/A | N/A | 5019 | 5034 | GTGTCACCCTAAGGAG | 29 | 947 |
| 904537 | N/A | N/A | 5106 | 5121 | CCGCTGATTCCACTTC | 35 | 948 |
| 904569 | N/A | N/A | 5233 | 5248 | CAGGTGGAAACACCCC | 1 | 949 |
| 904601 | N/A | N/A | 5335 | 5350 | CCAGTTAAGCTGGAAG | 4 | 950 |
| 904633 | N/A | N/A | 5458 | 5473 | GGTAGCCGTGTTATAT | 74 | 951 |
| 904665 | N/A | N/A | 5653 | 5668 | GACTGAACTCAGCCCC | 57 | 952 |
| 904697 | N/A | N/A | 5745 | 5760 | TGTTTCCCAATTCAGC | 67 | 953 |
| 904729 | N/A | N/A | 5796 | 5811 | ACCTTGTCTCCGACAC | 71 | 954 |
| 904761 | N/A | N/A | 5852 | 5867 | TGTAAGTGCAACCAAT | 85 | 955 |
| 904793 | N/A | N/A | 5921 | 5936 | TCCCTAAACTCACACT | 18 | 956 |
| 904825 | N/A | N/A | 5956 | 5971 | AGGCTAAGTTCCGGTC | 35 | 957 |
| 904857 | N/A | N/A | 6093 | 6108 | CAAACTCCACTGGGCC | 16 | 958 |
| 904889 | N/A | N/A | 6196 | 6211 | AAACTGCATTGCCCTC | 64 | 959 |
| 904921 | N/A | N/A | 6237 | 6252 | CCCGCACCACAGCCGT | 44 | 960 |
| 904953 | N/A | N/A | 6308 | 6323 | GCGCTGGGTCTGACCC | 0 | 961 |
| 904985 | N/A | N/A | 6369 | 6384 | CCACAGGATCCTGACA | 14 | 962 |
| 905017 | N/A | N/A | 6512 | 6527 | TAAAGCCAGCTGACAG | 47 | 963 |
| 905049 | N/A | N/A | 6588 | 6603 | CCCTGAAACTGCAAGC | 32 | 964 |
| 905081 | N/A | N/A | 6632 | 6647 | CCTGGACAGGCAATAC | 0 | 965 |
| 905113 | N/A | N/A | 6736 | 6751 | TTTGGATGGAAGGAAC | 71 | 966 |
| 905145 | N/A | N/A | 6824 | 6839 | AAATGAACGCAATGCT | 65 | 967 |
| 905177 | N/A | N/A | 6984 | 6999 | AGTGCTCTCGGCTTCT | 39 | 968 |
| 905209 | N/A | N/A | 7114 | 7129 | ACACGGCTCTCCACTG | 55 | 969 |
| 905241 | N/A | N/A | 7235 | 7250 | TGGGCACTCTCAGATG | 25 | 970 |
| 905273 | N/A | N/A | 7289 | 7304 | ACTCCACAGCATTGAG | 4 | 971 |
| 905305 | N/A | N/A | 7461 | 7476 | AAACCATCAAGCAGGA | 63 | 972 |
| 905337 | N/A | N/A | 7829 | 7844 | ACAAGAGACCTCATTC | 48 | 973 |
| 905369 | N/A | N/A | 7893 | 7908 | GGGACCAGTATGTATT | 21 | 974 |
| 905401 | N/A | N/A | 7990 | 8005 | AAGTCAGTACAGAGCA | 94 | 975 |
| 905433 | N/A | N/A | 8067 | 8082 | CCACACATGTTTCAAC | 62 | 976 |
| 905465 | N/A | N/A | 8158 | 8173 | GAATTTCCACTATTTT | 74 | 977 |
| 905497 | N/A | N/A | 8307 | 8322 | GGTTCAAAAGCAGCAT | 96 | 978 |
| 905529 | N/A | N/A | 8376 | 8391 | GGGTCAAACACTTTAT | 78 | 979 |
| 905561 | N/A | N/A | 8444 | 8459 | AAGTGAGCCTTCCAGG | 30 | 980 |
| 905593 | N/A | N/A | 8566 | 8581 | CAGATGTTGAAGTCAC | 56 | 981 |
| 905625 | N/A | N/A | 8723 | 8738 | CCTATTGTAAGAACAG | 58 | 982 |
| 905657 | N/A | N/A | 8820 | 8835 | TCAGGTGACTACATTT | 89 | 983 |
| 905689 | N/A | N/A | 8880 | 8895 | GTCATTAGTGCTATAG | 95 | 984 |
| 905721 | N/A | N/A | 8948 | 8963 | CCATTGCATAAGAGAT | 84 | 985 |

TABLE 15
Inhibition of APOL1 mRNA by 3-10-3 cEt gapmers targeting SEQ ID NO: 1 and 2

| | SEQ | SEQ | SEQ | SEQ | | | |
|---|---|---|---|---|---|---|---|
| | ID: 1 | ID: 1 | ID: 2 | ID: 2 | | | |
| Compound | Start | Stop | Start | Stop | | % | SEQ |
| Number | Site | Site | Site | Site | Sequence | inhibition | ID NO |
| 793406 | N/A | N/A | 8306 | 8321 | GTTCAAAAGCAGCATT | 86 | 13 |
| 903418 | 16 | 31 | 509 | 524 | ACCGAGGAATTCGAAA | 22 | 986 |
| 903450 | 59 | 74 | 552 | 567 | CGTCTGTATAATAACC | 37 | 987 |
| 903482 | 210 | 225 | N/A | N/A | AAGTGCACTCATCCAG | 50 | 988 |
| 903514 | 293 | 308 | 4768 | 4783 | GGATCTCCAGTATCTG | 15 | 989 |
| 903642 | 619 | 634 | 12710 | 12725 | TTATGTTATCCTCAAG | 67 | 990 |
| 903674 | 661 | 676 | 12752 | 12767 | TGTGGACCTTCTGAAC | 16 | 991 |
| 903706 | 733 | 748 | 12824 | 12839 | TGCCGACGAGGGTCAG | 42 | 992 |
| 903738 | 795 | 810 | 12886 | 12901 | CAACTCCATCCCAGGT | 37 | 993 |
| 903770 | 841 | 856 | 12932 | 12947 | AGTCCATGGTACTGCT | 21 | 994 |
| 903802 | 894 | 909 | 12985 | 13000 | GCTTTTGATGACCAGG | 87 | 995 |
| 903834 | 1000 | 1015 | 13091 | 13106 | TGTCCTTCCCAATGCC | 38 | 996 |
| 903866 | 1052 | 1067 | 13143 | 13158 | GAGGCATGCGGTACTG | 53 | 997 |
| 903898 | 1111 | 1126 | 13202 | 13217 | TCTCCACCTGTTCACC | 63 | 998 |
| 903930 | 1204 | 1219 | 13295 | 13310 | AGACTACATCCAGCAC | 81 | 999 |
| 903962 | 1337 | 1352 | 13428 | 13443 | TCCGCCTGCAGAATCT | 76 | 1000 |
| 903994 | 1406 | 1421 | 13497 | 13512 | ATTTTGTCCTGGCCCC | 64 | 1001 |
| 904026 | 1787 | 1802 | 13878 | 13893 | TGGAAATGCCAAAGTC | 97 | 1002 |
| 904058 | 1884 | 1899 | 13975 | 13990 | CAGTTCCCATTTTTCC | 93 | 1003 |
| 904090 | 2260 | 2275 | 14351 | 14366 | CTATTCTTCCGTCAAT | 67 | 1004 |
| 904122 | 2402 | 2417 | 14493 | 14508 | AGGACATTGAACCTGG | 65 | 1005 |
| 904154 | 2502 | 2517 | 14593 | 14608 | CCGCTGCCTGACTGAG | 81 | 1006 |
| 904186 | 2546 | 2561 | 14637 | 14652 | GGACCCATCACATGAC | 55 | 1007 |
| 904218 | 2716 | 2731 | 14807 | 14822 | CTTACCGGGTAAGAGC | 49 | 1008 |
| 904250 | 2797 | 2812 | 14888 | 14903 | TGGGCGGCGACAAGAC | 74 | 1009 |
| 904282 | N/A | N/A | 457 | 472 | ACCAAGCACAGCAAAC | 0 | 1010 |
| 904314 | N/A | N/A | 1341 | 1356 | ACCATTCTGCAACGCA | 68 | 1011 |
| 904346 | N/A | N/A | 655 | 670 | GGAGGCAGGTCAACTG | 5 | 1012 |
| 904378 | N/A | N/A | 2051 | 2066 | TGACCACCTGTCTTGG | 0 | 1013 |
| 904410 | N/A | N/A | 2716 | 2731 | GGTGCCTCGGATTCCC | 9 | 1014 |
| 904442 | N/A | N/A | 4052 | 4067 | GTGCTCAACTCTTCAT | 76 | 1015 |
| 904474 | N/A | N/A | 4615 | 4630 | CCAAGACCAACCTAAA | 29 | 1016 |
| 904506 | N/A | N/A | 5020 | 5035 | CGTGTCACCCTAAGGA | 51 | 1017 |
| 904538 | N/A | N/A | 5107 | 5122 | CCCGCTGATTCCACTT | 36 | 1018 |
| 904570 | N/A | N/A | 5234 | 5249 | TCAGGTGGAAACACCC | 11 | 1019 |
| 904602 | N/A | N/A | 5336 | 5351 | TCCAGTTAAGCTGGAA | 0 | 1020 |
| 904634 | N/A | N/A | 5460 | 5475 | CAGGTAGCCGTGTTAT | 41 | 1021 |
| 904666 | N/A | N/A | 5654 | 5669 | TGACTGAACTCAGCCC | 43 | 1022 |
| 904698 | N/A | N/A | 5747 | 5762 | GCTGTTTCCCAATTCA | 57 | 1023 |
| 904730 | N/A | N/A | 5797 | 5812 | AACCTTGTCTCCGACA | 46 | 1024 |
| 904762 | N/A | N/A | 5853 | 5868 | TTGTAAGTGCAACCAA | 76 | 1025 |
| 904794 | N/A | N/A | 5925 | 5940 | GACCTCCCTAAACTCA | 13 | 1026 |
| 904826 | N/A | N/A | 5957 | 5972 | AAGGCTAAGTTCCGGT | 47 | 1027 |
| 904858 | N/A | N/A | 6104 | 6119 | GACAAGAACCCCAAAC | 0 | 1028 |
| 904890 | N/A | N/A | 6197 | 6212 | AAAACTGCATTGCCCT | 72 | 1029 |
| 904922 | N/A | N/A | 6238 | 6253 | ACCCGCACCACAGCCG | 12 | 1030 |
| 904954 | N/A | N/A | 6320 | 6335 | AGATCCAACTCGGCGC | 7 | 1031 |
| 904986 | N/A | N/A | 6370 | 6385 | CCCACAGGATCCTGAC | 25 | 1032 |
| 905018 | N/A | N/A | 6514 | 6529 | CTTAAAGCCAGCTGAC | 25 | 1033 |
| 905050 | N/A | N/A | 6590 | 6605 | CCCCCTGAAACTGCAA | 34 | 1034 |
| 905082 | N/A | N/A | 6633 | 6648 | TCCTGGACAGGCAATA | 32 | 1035 |
| 905114 | N/A | N/A | 6739 | 6754 | AGGTTTGGATGGAAGG | 90 | 1036 |
| 905146 | N/A | N/A | 6825 | 6840 | GAAATGAACGCAATGC | 87 | 1037 |
| 905178 | N/A | N/A | 6985 | 7000 | GAGTGCTCTCGGCTTC | 47 | 1038 |
| 905210 | N/A | N/A | 7115 | 7130 | TACACGGCTCTCCACT | 73 | 1039 |
| 905242 | N/A | N/A | 7236 | 7251 | TTGGGCACTCTCAGAT | 8 | 1040 |
| 905274 | N/A | N/A | 7290 | 7305 | AACTCCACAGCATTGA | 53 | 1041 |
| 905306 | N/A | N/A | 7466 | 7481 | GCCCAAAACCATCAAG | 3 | 1042 |
| 905338 | N/A | N/A | 7830 | 7845 | CACAAGAGACCTCATT | 15 | 1043 |
| 905370 | N/A | N/A | 7917 | 7932 | TATGGAATTGCAGATA | 85 | 1044 |
| 905402 | N/A | N/A | 7991 | 8006 | CAAGTCAGTACAGAGC | 93 | 1045 |
| 905434 | N/A | N/A | 8068 | 8083 | CCCACACATGTTTCAA | 58 | 1046 |
| 905466 | N/A | N/A | 8159 | 8174 | AGAATTTCCACTATTT | 82 | 1047 |
| 905498 | N/A | N/A | 8308 | 8323 | TGGTTCAAAAGCAGCA | 90 | 1048 |
| 905530 | N/A | N/A | 8377 | 8392 | TGGGTCAAACACTTTA | 63 | 1049 |
| 905562 | N/A | N/A | 8445 | 8460 | GAAGTGAGCCTTCCAG | 60 | 1050 |
| 905594 | N/A | N/A | 8567 | 8582 | CCAGATGTTGAAGTCA | 76 | 1051 |
| 905626 | N/A | N/A | 8724 | 8739 | TCCTATTGTAAGAACA | 54 | 1052 |
| 905658 | N/A | N/A | 8821 | 8836 | CTCAGGTGACTACATT | 87 | 1053 |
| 905690 | N/A | N/A | 8881 | 8896 | AGTCATTAGTGCTATA | 90 | 1054 |
| 905722 | N/A | N/A | 8949 | 8964 | GCCATTGCATAAGAGA | 29 | 1055 |

TABLE 16
Inhibition of APOL1 mRNA by 3-10-3 cEt gapmers targeting SEQ ID NO: 1 and 2

| | SEQ | SEQ | SEQ | SEQ | | | |
|---|---|---|---|---|---|---|---|
| | ID: 1 | ID: 1 | ID: 2 | ID: 2 | | | |
| Compound | Start | Stop | Start | Stop | | % | SEQ |
| Number | Site | Site | Site | Site | Sequence | inhibition | ID NO |
| 903419 | 17 | 32 | 510 | 525 | TACCGAGGAATTCGAA | 13 | 1056 |
| 903451 | 73 | 88 | 566 | 581 | CACCTCCAGTTATGCG | 51 | 1057 |
| 903483 | 211 | 226 | N/A | N/A | AAAGTGCACTCATCCA | 71 | 1058 |
| 903515 | 294 | 309 | 4769 | 4784 | AGGATCTCCAGTATCT | 24 | 1059 |
| 903643 | 620 | 635 | 12711 | 12726 | CTTATGTTATCCTCAA | 81 | 1060 |
| 903675 | 662 | 677 | 12753 | 12768 | TTGTGGACCTTCTGAA | 58 | 1061 |
| 903707 | 734 | 749 | 12825 | 12840 | ATGCCGACGAGGGTCA | 49 | 1062 |
| 903739 | 801 | 816 | 12892 | 12907 | GATTCCCAACTCCATC | 10 | 1063 |
| 903771 | 842 | 857 | 12933 | 12948 | TAGTCCATGGTACTGC | 4 | 1064 |
| 903803 | 896 | 911 | 12987 | 13002 | AGGCTTTTGATGACCA | 24 | 1065 |
| 903835 | 1001 | 1016 | 13092 | 13107 | ATGTCCTTCCCAATGC | 32 | 1066 |
| 903867 | 1053 | 1068 | 13144 | 13159 | TGAGGCATGCGGTACT | 88 | 1067 |
| 903899 | 1115 | 1130 | 13206 | 13221 | ACCCTCTCCACCTGTT | 41 | 1068 |
| 903931 | 1205 | 1220 | 13296 | 13311 | TAGACTACATCCAGCA | 72 | 1069 |
| 903963 | 1338 | 1353 | 13429 | 13444 | GTCCGCCTGCAGAATC | 82 | 1070 |
| 903995 | 1701 | 1716 | 13792 | 13807 | AAAAGCGATGGCTCAC | 57 | 1071 |
| 904027 | 1791 | 1806 | 13882 | 13897 | GCTATGGAAATGCCAA | 90 | 1072 |
| 904059 | 1886 | 1901 | 13977 | 13992 | TCCAGTTCCCATTTTT | 90 | 1073 |
| 904091 | 2264 | 2279 | 14355 | 14370 | CTCTCTATTCTTCCGT | 92 | 1074 |
| 904123 | 2404 | 2419 | 14495 | 14510 | GGAGGACATTGAACCT | 62 | 1075 |
| 904155 | 2503 | 2518 | 14594 | 14609 | GCCGCTGCCTGACTGA | 48 | 1076 |
| 904187 | 2589 | 2604 | 14680 | 14695 | CAGTGTTCAAGCAGGG | 83 | 1077 |
| 904219 | 2717 | 2732 | 14808 | 14823 | ACTTACCGGGTAAGAG | 49 | 1078 |
| 904251 | 2798 | 2813 | 14889 | 14904 | CTGGGCGGCGACAAGA | 39 | 1079 |
| 904283 | N/A | N/A | 458 | 473 | GACCAAGCACAGCAAA | 0 | 1080 |
| 904315 | N/A | N/A | 1342 | 1357 | CACCATTCTGCAACGC | 74 | 1081 |
| 904347 | N/A | N/A | 767 | 782 | CAATCAGACTCAAGCC | 19 | 1082 |
| 904379 | N/A | N/A | 2053 | 2068 | CGTGACCACCTGTCTT | 16 | 1083 |
| 904411 | N/A | N/A | 2721 | 2736 | GAGCTGGTGCCTCGGA | 30 | 1084 |
| 904443 | N/A | N/A | 4081 | 4096 | CCTCATTGCAAATCCT | 96 | 1085 |
| 904475 | N/A | N/A | 4648 | 4663 | GCTCTGCAAATCTCTC | 15 | 1086 |
| 904507 | N/A | N/A | 5021 | 5036 | CCGTGTCACCCTAAGG | 54 | 1087 |
| 904539 | N/A | N/A | 5108 | 5123 | CCCCGCTGATTCCACT | 16 | 1088 |
| 904571 | N/A | N/A | 5235 | 5250 | CTCAGGTGGAAACACC | 34 | 1089 |
| 904603 | N/A | N/A | 5337 | 5352 | GTCCAGTTAAGCTGGA | 9 | 1090 |
| 904635 | N/A | N/A | 5461 | 5476 | CCAGGTAGCCGTGTTA | 74 | 1091 |
| 904667 | N/A | N/A | 5655 | 5670 | ATGACTGAACTCAGCC | 32 | 1092 |
| 904699 | N/A | N/A | 5757 | 5772 | CCTCCAGTTTGCTGTT | 48 | 1093 |
| 904731 | N/A | N/A | 5798 | 5813 | AAACCTTGTCTCCGAC | 66 | 1094 |
| 904763 | N/A | N/A | 5854 | 5869 | TTTGTAAGTGCAACCA | 96 | 1095 |
| 904795 | N/A | N/A | 5926 | 5941 | AGACCTCCCTAAACTC | 8 | 1096 |
| 904827 | N/A | N/A | 5958 | 5973 | CAAGGCTAAGTTCCGG | 64 | 1097 |
| 904859 | N/A | N/A | 6106 | 6121 | AAGACAAGAACCCCAA | 68 | 1098 |
| 904891 | N/A | N/A | 6198 | 6213 | CAAAACTGCATTGCCC | 50 | 1099 |
| 904923 | N/A | N/A | 6242 | 6257 | ACCCACCCGCACCACA | 16 | 1100 |
| 904955 | N/A | N/A | 6321 | 6336 | GAGATCCAACTCGGCG | 11 | 1101 |
| 904987 | N/A | N/A | 6371 | 6386 | GCCCACAGGATCCTGA | 0 | 1102 |
| 905051 | N/A | N/A | 6592 | 6607 | AACCCCCTGAAACTGC | 65 | 1103 |
| 905083 | N/A | N/A | 6634 | 6649 | TTCCTGGACAGGCAAT | 31 | 1104 |
| 905115 | N/A | N/A | 6740 | 6755 | CAGGTTTGGATGGAAG | 74 | 1105 |
| 905147 | N/A | N/A | 6826 | 6841 | GGAAATGAACGCAATG | 91 | 1106 |
| 905179 | N/A | N/A | 6986 | 7001 | TGAGTGCTCTCGGCTT | 62 | 1107 |
| 905211 | N/A | N/A | 7116 | 7131 | GTACACGGCTCTCCAC | 7 | 1108 |
| 905243 | N/A | N/A | 7237 | 7252 | CTTGGGCACTCTCAGA | 44 | 1109 |
| 905275 | N/A | N/A | 7291 | 7306 | AAACTCCACAGCATTG | 30 | 1110 |
| 905307 | N/A | N/A | 7467 | 7482 | CGCCCAAAACCATCAA | 44 | 1111 |
| 905339 | N/A | N/A | 7833 | 7848 | ACACACAAGAGACCTC | 0 | 1112 |
| 905371 | N/A | N/A | 7918 | 7933 | TTATGGAATTGCAGAT | 93 | 1113 |
| 905403 | N/A | N/A | 7992 | 8007 | TCAAGTCAGTACAGAG | 92 | 1114 |
| 905435 | N/A | N/A | 8070 | 8085 | CACCCACACATGTTTC | 49 | 1115 |
| 905467 | N/A | N/A | 8160 | 8175 | CAGAATTTCCACTATT | 85 | 1116 |
| 905499 | N/A | N/A | 8309 | 8324 | TTGGTTCAAAAGCAGC | 92 | 1117 |
| 905531 | N/A | N/A | 8378 | 8393 | TTGGGTCAAACACTTT | 69 | 1118 |
| 905563 | N/A | N/A | 8448 | 8463 | CATGAAGTGAGCCTTC | 56 | 1119 |
| 905595 | N/A | N/A | 8568 | 8583 | GCCAGATGTTGAAGTC | 34 | 1120 |
| 905627 | N/A | N/A | 8725 | 8740 | GTCCTATTGTAAGAAC | 24 | 1121 |
| 905659 | N/A | N/A | 8822 | 8837 | ACTCAGGTGACTACAT | 71 | 1122 |
| 905691 | N/A | N/A | 8882 | 8897 | GAGTCATTAGTGCTAT | 92 | 1123 |
| 905723 | N/A | N/A | 8951 | 8966 | CAGCCATTGCATAAGA | 46 | 1124 |

TABLE 17
Inhibition of APOL1 mRNA by 3-10-3 cEt gapmers targeting SEQ ID NO: 1 and 2

| | SEQ | SEQ | SEQ | SEQ | | | |
|---|---|---|---|---|---|---|---|
| | ID: 1 | ID: 1 | ID: 2 | ID: 2 | | | |
| Compound | Start | Stop | Start | Stop | | % | SEQ |
| Number | Site | Site | Site | Site | Sequence | inhibition | ID NO |
| 793406 | N/A | N/A | 8306 | 8321 | GTTCAAAAGCAGCATT | 84 | 13 |
| 903420 | 18 | 33 | 511 | 526 | ATACCGAGGAATTCGA | 5 | 1125 |
| 903452 | 74 | 89 | 567 | 582 | CCACCTCCAGTTATGC | 70 | 1126 |
| 903484 | 212 | 227 | 4505 | 4520 | AAAAGTGCACTCATCC | 65 | 1127 |
| 903516 | 295 | 310 | 4770 | 4785 | GAGGATCTCCAGTATC | 60 | 1128 |
| 903644 | 623 | 638 | 12714 | 12729 | CTTCTTATGTTATCCT | 90 | 1129 |
| 903676 | 663 | 678 | 12754 | 12769 | TTTGTGGACCTTCTGA | 76 | 1130 |
| 903708 | 735 | 750 | 12826 | 12841 | CATGCCGACGAGGGTC | 25 | 1131 |
| 903740 | 805 | 820 | 12896 | 12911 | CTGTGATTCCCAACTC | 66 | 1132 |
| 903772 | 843 | 858 | 12934 | 12949 | GTAGTCCATGGTACTG | 15 | 1133 |
| 903804 | 897 | 912 | 12988 | 13003 | AAGGCTTTTGATGACC | 64 | 1134 |
| 903836 | 1002 | 1017 | 13093 | 13108 | GATGTCCTTCCCAATG | 29 | 1135 |
| 903868 | 1054 | 1069 | 13145 | 13160 | CTGAGGCATGCGGTAC | 78 | 1136 |
| 903900 | 1116 | 1131 | 13207 | 13222 | AACCCTCTCCACCTGT | 48 | 1137 |
| 903932 | 1206 | 1221 | 13297 | 13312 | GTAGACTACATCCAGC | 63 | 1138 |
| 903964 | 1339 | 1354 | 13430 | 13445 | GGTCCGCCTGCAGAAT | 70 | 1139 |
| 903996 | 1706 | 1721 | 13797 | 13812 | GGGTCAAAAGCGATGG | 94 | 1140 |
| 904028 | 1792 | 1807 | 13883 | 13898 | AGCTATGGAAATGCCA | 62 | 1141 |
| 904060 | 1888 | 1903 | 13979 | 13994 | TCTCCAGTTCCCATTT | 73 | 1142 |
| 904092 | 2270 | 2285 | 14361 | 14376 | AGCCTCCTCTCTATTC | 49 | 1143 |
| 904124 | 2405 | 2420 | 14496 | 14511 | CGGAGGACATTGAACC | 89 | 1144 |
| 904156 | 2504 | 2519 | 14595 | 14610 | AGCCGCTGCCTGACTG | 54 | 1145 |
| 904188 | 2590 | 2605 | 14681 | 14696 | TCAGTGTTCAAGCAGG | 92 | 1146 |
| 904220 | 2718 | 2733 | 14809 | 14824 | TACTTACCGGGTAAGA | 47 | 1147 |
| 904252 | 2799 | 2814 | 14890 | 14905 | CCTGGGCGGCGACAAG | 53 | 1148 |
| 904284 | N/A | N/A | 459 | 474 | TGACCAAGCACAGCAA | 10 | 1149 |
| 904316 | N/A | N/A | 1343 | 1358 | GCACCATTCTGCAACG | 29 | 1150 |
| 904348 | N/A | N/A | 801 | 816 | TCTATAGTTTAAGAGC | 6 | 1151 |
| 904380 | N/A | N/A | 2437 | 2452 | TCCCGCCTCAGGGCTC | 22 | 1152 |
| 904412 | N/A | N/A | 2788 | 2803 | ACACCATCTCATGAGC | 59 | 1153 |
| 904444 | N/A | N/A | 4200 | 4215 | GTTTTTACAATAGTGC | 97 | 1154 |
| 904476 | N/A | N/A | 4667 | 4682 | GCTTGCTTGAGCAGCC | 16 | 1155 |
| 904508 | N/A | N/A | 5022 | 5037 | GCCGTGTCACCCTAAG | 65 | 1156 |
| 904540 | N/A | N/A | 5109 | 5124 | CCCCCGCTGATTCCAC | 43 | 1157 |
| 904572 | N/A | N/A | 5236 | 5251 | CCTCAGGTGGAAACAC | 0 | 1158 |
| 904604 | N/A | N/A | 5338 | 5353 | GGTCCAGTTAAGCTGG | 12 | 1159 |
| 904636 | N/A | N/A | 5462 | 5477 | GCCAGGTAGCCGTGTT | 61 | 1160 |
| 904668 | N/A | N/A | 5656 | 5671 | GATGACTGAACTCAGC | 63 | 1161 |
| 904700 | N/A | N/A | 5760 | 5775 | CCTCCTCCAGTTTGCT | 50 | 1162 |
| 904732 | N/A | N/A | 5799 | 5814 | TAAACCTTGTCTCCGA | 87 | 1163 |
| 904764 | N/A | N/A | 5855 | 5870 | TTTTGTAAGTGCAACC | 94 | 1164 |
| 904796 | N/A | N/A | 5927 | 5942 | GAGACCTCCCTAAACT | 26 | 1165 |
| 904828 | N/A | N/A | 5959 | 5974 | GCAAGGCTAAGTTCCG | 97 | 1166 |
| 904860 | N/A | N/A | 6108 | 6123 | CAAAGACAAGAACCCC | 68 | 1167 |
| 904892 | N/A | N/A | 6199 | 6214 | ACAAAACTGCATTGCC | 50 | 1168 |
| 904924 | N/A | N/A | 6254 | 6269 | ACTAAACCCCACACCC | 6 | 1169 |
| 904956 | N/A | N/A | 6322 | 6337 | TGAGATCCAACTCGGC | 65 | 1170 |
| 904988 | N/A | N/A | 6372 | 6387 | GGCCCACAGGATCCTG | 0 | 1171 |
| 905020 | N/A | N/A | 6536 | 6551 | CTTCTGTTAGATACAA | 93 | 1172 |
| 905052 | N/A | N/A | 6593 | 6608 | TAACCCCCTGAAACTG | 61 | 1173 |
| 905084 | N/A | N/A | 6635 | 6650 | ATTCCTGGACAGGCAA | 62 | 1174 |
| 905116 | N/A | N/A | 6741 | 6756 | CCAGGTTTGGATGGAA | 73 | 1175 |
| 905148 | N/A | N/A | 6827 | 6842 | GGGAAATGAACGCAAT | 89 | 1176 |
| 905180 | N/A | N/A | 6987 | 7002 | CTGAGTGCTCTCGGCT | 77 | 1177 |
| 905212 | N/A | N/A | 7117 | 7132 | GGTACACGGCTCTCCA | 29 | 1178 |
| 905244 | N/A | N/A | 7238 | 7253 | TCTTGGGCACTCTCAG | 80 | 1179 |
| 905276 | N/A | N/A | 7298 | 7313 | ATGTCTCAAACTCCAC | 90 | 1180 |
| 905308 | N/A | N/A | 7468 | 7483 | CCGCCCAAAACCATCA | 58 | 1181 |
| 905340 | N/A | N/A | 7835 | 7850 | GCACACACAAGAGACC | 13 | 1182 |
| 905372 | N/A | N/A | 7921 | 7936 | GAATTATGGAATTGCA | 90 | 1183 |
| 905404 | N/A | N/A | 7994 | 8009 | ACTCAAGTCAGTACAG | 87 | 1184 |
| 905436 | N/A | N/A | 8077 | 8092 | GTAATCACACCCACAC | 50 | 1185 |
| 905468 | N/A | N/A | 8162 | 8177 | TTCAGAATTTCCACTA | 92 | 1186 |
| 905500 | N/A | N/A | 8310 | 8325 | ATTGGTTCAAAAGCAG | 85 | 1187 |
| 905532 | N/A | N/A | 8379 | 8394 | GTTGGGTCAAACACTT | 71 | 1188 |
| 905564 | N/A | N/A | 8449 | 8464 | ACATGAAGTGAGCCTT | 88 | 1189 |
| 905596 | N/A | N/A | 8620 | 8635 | TTTGGCACCTTCACCT | 53 | 1190 |
| 905628 | N/A | N/A | 8738 | 8753 | TTAGAGGGCTAGTGTC | 82 | 1191 |
| 905660 | N/A | N/A | 8823 | 8838 | AACTCAGGTGACTACA | 68 | 1192 |
| 905692 | N/A | N/A | 8883 | 8898 | GGAGTCATTAGTGCTA | 82 | 1193 |
| 905724 | N/A | N/A | 8952 | 8967 | ACAGCCATTGCATAAG | 50 | 1194 |

TABLE 18
Inhibition of APOL1 mRNA by 3-10-3 cEt gapmers targeting SEQ ID NO: 1 and 2

| | SEQ | SEQ | SEQ | SEQ | | | |
|---|---|---|---|---|---|---|---|
| | ID: 1 | ID: 1 | ID: 2 | ID: 2 | | | |
| Compound | Start | Stop | Start | Stop | | % | SEQ |
| Number | Site | Site | Site | Site | Sequence | inhibition | ID NO |
| 793406 | N/A | N/A | 8306 | 8321 | GTTCAAAAGCAGCATT | 87 | 13 |
| 903421 | 19 | 34 | 512 | 527 | TATACCGAGGAATTCG | 23 | 1195 |
| 903453 | 75 | 90 | 568 | 583 | CCCACCTCCAGTTATG | 45 | 1196 |
| 903485 | 217 | 232 | 4510 | 4525 | CAAGGAAAAGTGCACT | 33 | 1197 |
| 903517 | 296 | 311 | 4771 | 4786 | TGAGGATCTCCAGTAT | 69 | 1198 |
| 903613 | 527 | 542 | 12618 | 12633 | TTCATGATCATTTGTC | 88 | 1199 |
| 903645 | 624 | 639 | 12715 | 12730 | CCTTCTTATGTTATCC | 82 | 1200 |
| 903677 | 664 | 679 | 12755 | 12770 | CTTTGTGGACCTTCTG | 74 | 1201 |
| 903709 | 736 | 751 | 12827 | 12842 | CCATGCCGACGAGGGT | 25 | 1202 |
| 903741 | 806 | 821 | 12897 | 12912 | GCTGTGATTCCCAACT | 59 | 1203 |
| 903773 | 844 | 859 | 12935 | 12950 | CGTAGTCCATGGTACT | 25 | 1204 |
| 903805 | 898 | 913 | 12989 | 13004 | CAAGGCTTTTGATGAC | 88 | 1205 |
| 903837 | 1003 | 1018 | 13094 | 13109 | GGATGTCCTTCCCAAT | 46 | 1206 |
| 903869 | 1079 | 1094 | 13170 | 13185 | GGCTCAGTGACCCGGG | 17 | 1207 |
| 903901 | 1119 | 1134 | 13210 | 13225 | ATTAACCCTCTCCACC | 27 | 1208 |
| 903933 | 1207 | 1222 | 13298 | 13313 | GGTAGACTACATCCAG | 59 | 1209 |
| 903965 | 1340 | 1355 | 13431 | 13446 | TGGTCCGCCTGCAGAA | 83 | 1210 |
| 904029 | 1793 | 1808 | 13884 | 13899 | CAGCTATGGAAATGCC | 86 | 1211 |
| 904061 | 1890 | 1905 | 13981 | 13996 | ACTCTCCAGTTCCCAT | 88 | 1212 |
| 904093 | 2272 | 2287 | 14363 | 14378 | CAAGCCTCCTCTCTAT | 81 | 1213 |
| 904125 | 2407 | 2422 | 14498 | 14513 | TTCGGAGGACATTGAA | 19 | 1214 |
| 904157 | 2505 | 2520 | 14596 | 14611 | AAGCCGCTGCCTGACT | 48 | 1215 |
| 904189 | 2591 | 2606 | 14682 | 14697 | TTCAGTGTTCAAGCAG | 92 | 1216 |
| 904253 | 2800 | 2815 | 14891 | 14906 | TCCTGGGCGGCGACAA | 92 | 1217 |
| 904317 | N/A | N/A | 1344 | 1359 | GGCACCATTCTGCAAC | 28 | 1218 |
| 904349 | N/A | N/A | 807 | 822 | CAACCCTCTATAGTTT | 12 | 1219 |
| 904381 | N/A | N/A | 2448 | 2463 | GGAGCCCTCCCTCCCG | 0 | 1220 |
| 904413 | N/A | N/A | 2821 | 2836 | TGTGTGATCCCCTAGG | 22 | 1221 |
| 904445 | N/A | N/A | 4206 | 4221 | GCCAGTGTTTTTACAA | 72 | 1222 |
| 904477 | N/A | N/A | 4691 | 4706 | TGAGCCACCAGTGGAC | 0 | 1223 |
| 904541 | N/A | N/A | 5110 | 5125 | CCCCCCGCTGATTCCA | 31 | 1224 |
| 904573 | N/A | N/A | 5238 | 5253 | AGCCTCAGGTGGAAAC | 53 | 1225 |
| 904605 | N/A | N/A | 5339 | 5354 | GGGTCCAGTTAAGCTG | 14 | 1226 |
| 904669 | N/A | N/A | 5658 | 5673 | TAGATGACTGAACTCA | 79 | 1227 |
| 904701 | N/A | N/A | 5761 | 5776 | GCCTCCTCCAGTTTGC | 34 | 1228 |
| 904733 | N/A | N/A | 5801 | 5816 | GATAAACCTTGTCTCC | 65 | 1229 |
| 904765 | N/A | N/A | 5856 | 5871 | GTTTTGTAAGTGCAAC | 73 | 1230 |
| 904797 | N/A | N/A | 5928 | 5943 | GGAGACCTCCCTAAAC | 33 | 1231 |
| 904829 | N/A | N/A | 5960 | 5975 | GGCAAGGCTAAGTTCC | 91 | 1232 |
| 904861 | N/A | N/A | 6111 | 6126 | CAGCAAAGACAAGAAC | 53 | 1233 |
| 904893 | N/A | N/A | 6201 | 6216 | GTACAAAACTGCATTG | 31 | 1234 |
| 904925 | N/A | N/A | 6255 | 6270 | CACTAAACCCCACACC | 26 | 1235 |
| 904957 | N/A | N/A | 6323 | 6338 | GTGAGATCCAACTCGG | 77 | 1236 |
| 904989 | N/A | N/A | 6374 | 6389 | TGGGCCCACAGGATCC | 4 | 1237 |
| 905021 | N/A | N/A | 6537 | 6552 | ACTTCTGTTAGATACA | 95 | 1238 |
| 905053 | N/A | N/A | 6594 | 6609 | GTAACCCCCTGAAACT | 45 | 1239 |
| 905085 | N/A | N/A | 6638 | 6653 | AACATTCCTGGACAGG | 31 | 1240 |
| 905117 | N/A | N/A | 6742 | 6757 | CCCAGGTTTGGATGGA | 49 | 1241 |
| 905149 | N/A | N/A | 6828 | 6843 | AGGGAAATGAACGCAA | 86 | 1242 |
| 905181 | N/A | N/A | 6988 | 7003 | GCTGAGTGCTCTCGGC | 57 | 1243 |
| 905213 | N/A | N/A | 7118 | 7133 | GGGTACACGGCTCTCC | 38 | 1244 |
| 905245 | N/A | N/A | 7239 | 7254 | GTCTTGGGCACTCTCA | 89 | 1245 |
| 905277 | N/A | N/A | 7300 | 7315 | TAATGTCTCAAACTCC | 90 | 1246 |
| 905309 | N/A | N/A | 7469 | 7484 | ACCGCCCAAAACCATC | 57 | 1247 |
| 905341 | N/A | N/A | 7836 | 7851 | TGCACACACAAGAGAC | 0 | 1248 |
| 905373 | N/A | N/A | 7922 | 7937 | GGAATTATGGAATTGC | 98 | 1249 |
| 905405 | N/A | N/A | 7995 | 8010 | AACTCAAGTCAGTACA | 81 | 1250 |
| 905437 | N/A | N/A | 8081 | 8096 | CCCTGTAATCACACCC | 71 | 1251 |
| 905501 | N/A | N/A | 8311 | 8326 | TATTGGTTCAAAAGCA | 87 | 1252 |
| 905533 | N/A | N/A | 8381 | 8396 | CTGTTGGGTCAAACAC | 41 | 1253 |
| 905565 | N/A | N/A | 8450 | 8465 | AACATGAAGTGAGCCT | 88 | 1254 |
| 905597 | N/A | N/A | 8621 | 8636 | TTTTGGCACCTTCACC | 76 | 1255 |
| 905629 | N/A | N/A | 8739 | 8754 | ATTAGAGGGCTAGTGT | 73 | 1256 |
| 905661 | N/A | N/A | 8824 | 8839 | AAACTCAGGTGACTAC | 75 | 1257 |
| 905693 | N/A | N/A | 8884 | 8899 | TGGAGTCATTAGTGCT | 91 | 1258 |
| 905725 | N/A | N/A | 8953 | 8968 | AACAGCCATTGCATAA | 10 | 1259 |

TABLE 19
Inhibition of APOL1 mRNA by 3-10-3 cEt gapmers targeting SEQ ID NO: 1 and 2

| | SEQ | SEQ | SEQ | SEQ | | | |
|---|---|---|---|---|---|---|---|
| | ID: 1 | ID: 1 | ID: 2 | ID: 2 | | % | SEQ |
| Compound | Start | Stop | Start | Stop | | inhi- | ID |
| Number | Site | Site | Site | Site | Sequence | bition | NO |
| 793406 | N/A | N/A | 8306 | 8321 | GTTCAAAAGCAGCATT | 74 | 13 |
| 903426 | 24 | 39 | 517 | 532 | CAAGATATACCGAGGA | 0 | 1260 |
| 903458 | 125 | 140 | 618 | 633 | TTCCCCTGGCAGAGAC | 3 | 1261 |
| 903490 | 253 | 268 | N/A | N/A | CCCTCGCTCCAGCTTC | 61 | 1262 |
| 903522 | 303 | 318 | 4778 | 4793 | CTTACTTTGAGGATCT | 68 | 1263 |
| 903618 | 560 | 575 | 12651 | 12666 | TACTGCTGGCCTTTAT | 59 | 1264 |
| 903650 | 629 | 644 | 12720 | 12735 | CGGAGCCTTCTTATGT | 30 | 1265 |
| 903682 | 670 | 685 | 12761 | 12776 | TGGTGCCTTTGTGGAC | 0 | 1266 |
| 903714 | 741 | 756 | 12832 | 12847 | CAGACCCATGCCGACG | 37 | 1267 |
| 903746 | 811 | 826 | 12902 | 12917 | AAGCGGCTGTGATTCC | 60 | 1268 |
| 903778 | 850 | 865 | 12941 | 12956 | TCTTTCCGTAGTCCAT | 14 | 1269 |
| 903810 | 931 | 946 | 13022 | 13037 | CACCCAAAAACTCCCT | 59 | 1270 |
| 903842 | 1008 | 1023 | 13099 | 13114 | GGCACGGATGTCCTTC | 48 | 1271 |
| 903874 | 1084 | 1099 | 13175 | 13190 | AGATTGGCTCAGTGAC | 91 | 1272 |
| 903906 | 1127 | 1142 | 13218 | 13233 | CTGGGTTCATTAACCC | 0 | 1273 |
| 903938 | 1212 | 1227 | 13303 | 13318 | CACGAGGTAGACTACA | 56 | 1274 |
| 903970 | 1345 | 1360 | 13436 | 13451 | GTTCTTGGTCCGCCTG | 62 | 1275 |
| 904002 | 1741 | 1756 | 13832 | 13847 | ACCCTCTTTATCCCCC | 91 | 1276 |
| 904034 | 1799 | 1814 | 13890 | 13905 | TGTGCTCAGCTATGGA | 84 | 1277 |
| 904066 | 1926 | 1941 | 14017 | 14032 | TTAGTCTAAAGTAAAC | 44 | 1278 |
| 904098 | 2284 | 2299 | 14375 | 14390 | TGCTGGTTCCTTCAAG | 76 | 1279 |
| 904130 | 2413 | 2428 | 14504 | 14519 | TCATTCTTCGGAGGAC | 73 | 1280 |
| 904162 | 2511 | 2526 | 14602 | 14617 | ATCAGGAAGCCGCTGC | 52 | 1281 |
| 904194 | 2609 | 2624 | 14700 | 14715 | ATGGCCCACCACCTGC | 0 | 1282 |
| 904226 | 2736 | 2751 | 14827 | 14842 | GCTAATTTTCTGACTG | 96 | 1283 |
| 904258 | 2805 | 2820 | 14896 | 14911 | GTCAATCCTGGGCGGC | 63 | 1284 |
| 904322 | N/A | N/A | 1374 | 1389 | TCATGATTGCAAAGCT | 20 | 1285 |
| 904354 | N/A | N/A | 837 | 852 | AGCTTTGTGAACCCAT | 10 | 1286 |
| 904386 | N/A | N/A | 2482 | 2497 | GCCCAAGCCCAGTCCA | 0 | 1287 |
| 904418 | N/A | N/A | 3410 | 3425 | AGGGTATATGAAAGTT | 77 | 1288 |
| 904450 | N/A | N/A | 4340 | 4355 | AGCCAGTGTGTATTGC | 83 | 1289 |
| 904482 | N/A | N/A | 4733 | 4748 | TTGCACCCTTGAGGAG | 0 | 1290 |
| 904514 | N/A | N/A | 5058 | 5073 | GCTAGGTGCCAGGGTA | 78 | 1291 |
| 904546 | N/A | N/A | 5115 | 5130 | CCCCCCCCCCCGCTGA | 16 | 1292 |
| 904578 | N/A | N/A | 5303 | 5318 | ACATTCCCACAGGGCC | 0 | 1293 |
| 904610 | N/A | N/A | 5361 | 5376 | GGATGTGGCAAAGGAC | 54 | 1294 |
| 904642 | N/A | N/A | 5490 | 5505 | GCCCTATTGTGTGGCA | 0 | 1295 |
| 904674 | N/A | N/A | 5682 | 5697 | ATTTTTCTTTGACCGG | 64 | 1296 |
| 904706 | N/A | N/A | 5766 | 5781 | ACGAAGCCTCCTCCAG | 55 | 1297 |
| 904738 | N/A | N/A | 5807 | 5822 | TCACCCGATAAACCTT | 82 | 1298 |
| 904770 | N/A | N/A | 5868 | 5883 | CCCAAACAGGCAGTTT | 57 | 1299 |
| 904802 | N/A | N/A | 5933 | 5948 | TATTCGGAGACCTCCC | 5 | 1300 |
| 904834 | N/A | N/A | 5965 | 5980 | ACCTGGGCAAGGCTAA | 52 | 1301 |
| 904866 | N/A | N/A | 6138 | 6153 | CTTACTCCACACCTTA | 72 | 1302 |
| 904898 | N/A | N/A | 6206 | 6221 | GTTTGGTACAAAACTG | 0 | 1303 |
| 904930 | N/A | N/A | 6261 | 6276 | TTGTCTCACTAAACCC | 21 | 1304 |
| 904962 | N/A | N/A | 6330 | 6345 | AAGACCAGTGAGATCC | 50 | 1305 |
| 904994 | N/A | N/A | 6402 | 6417 | AACCACCTGTAGGGAC | 69 | 1306 |
| 905026 | N/A | N/A | 6542 | 6557 | TGGGTACTTCTGTTAG | 62 | 1307 |
| 905058 | N/A | N/A | 6600 | 6615 | ACAGCTGTAACCCCCT | 13 | 1308 |
| 905090 | N/A | N/A | 6680 | 6695 | TGGTGGATATAAAAGC | 39 | 1309 |
| 905122 | N/A | N/A | 6794 | 6809 | AGCGATTGTCTTGTTT | 72 | 1310 |
| 905154 | N/A | N/A | 6879 | 6894 | TGCCGTGGCAACTCTG | 6 | 1311 |
| 905186 | N/A | N/A | 7037 | 7052 | GTTTTTCCTCAGTCCC | 69 | 1312 |
| 905218 | N/A | N/A | 7159 | 7174 | GGCACCTCCATGTTGC | 0 | 1313 |
| 905250 | N/A | N/A | 7244 | 7259 | TGCTGGTCTTGGGCAC | 17 | 1314 |
| 905282 | N/A | N/A | 7339 | 7354 | CCTTATAGCTTACCTG | 64 | 1315 |
| 905314 | N/A | N/A | 7475 | 7490 | AGAGTCACCGCCCAAA | 58 | 1316 |
| 905346 | N/A | N/A | 7843 | 7858 | CTTGCCGTGCACACAC | 10 | 1317 |
| 905378 | N/A | N/A | 7939 | 7954 | TGGTTTGCAGGGATCT | 56 | 1318 |
| 905410 | N/A | N/A | 8001 | 8016 | ACAAAGAACTCAAGTC | 55 | 1319 |
| 905442 | N/A | N/A | 8088 | 8103 | GACTGCTCCCTGTAAT | 0 | 1320 |
| 905474 | N/A | N/A | 8175 | 8190 | ATGTGTTTAGGCATTC | 81 | 1321 |
| 905506 | N/A | N/A | 8327 | 8342 | CATTGGGTTATGAAAT | 48 | 1322 |
| 905538 | N/A | N/A | 8386 | 8401 | CATGCCTGTTGGGTCA | 46 | 1323 |
| 905570 | N/A | N/A | 8460 | 8475 | GCTCAGCACCAACATG | 0 | 1324 |
| 905602 | N/A | N/A | 8631 | 8646 | ACTCCAACCCTTTTGG | 10 | 1325 |
| 905634 | N/A | N/A | 8744 | 8759 | ATTCTATTAGAGGGCT | 85 | 1326 |
| 905666 | N/A | N/A | 8831 | 8846 | AAGCTTTAAACTCAGG | 62 | 1327 |
| 905698 | N/A | N/A | 8893 | 8908 | CTTGTTTTATGGAGTC | 97 | 1328 |
| 905730 | N/A | N/A | 8960 | 8975 | AGTGCATAACAGCCAT | 9 | 1329 |

TABLE 20
Inhibition of APOL1 mRNA by 3-10-3 cEt gapmers targeting SEQ ID NO: 1 and 2

| | SEQ | SEQ | SEQ | SEQ | | | |
|---|---|---|---|---|---|---|---|
| | ID: 1 | ID: 1 | ID: 2 | ID: 2 | | % | SEQ |
| Compound | Start | Stop | Start | Stop | | inhi- | ID |
| Number | Site | Site | Site | Site | Sequence | bition | NO |
| 793406 | N/A | N/A | 8306 | 8321 | GTTCAAAAGCAGCATT | 74 | 13 |
| 903427 | 25 | 40 | 518 | 533 | CCAAGATATACCGAGG | 12 | 1330 |
| 903459 | 129 | 144 | 622 | 637 | AATCTTCCCCTGGCAG | 13 | 1331 |
| 903491 | 254 | 269 | N/A | N/A | ACCCTCGCTCCAGCTT | 50 | 1332 |
| 903523 | 306 | 321 | 4781 | 4796 | GGGCTTACTTTGAGGA | 0 | 1333 |
| 903619 | 561 | 576 | 12652 | 12667 | GTACTGCTGGCCTTTA | 47 | 1334 |
| 903651 | 630 | 645 | 12721 | 12736 | ACGGAGCCTTCTTATG | 34 | 1335 |
| 903683 | 671 | 686 | 12762 | 12777 | GTGGTGCCTTTGTGGA | 0 | 1336 |
| 903715 | 742 | 757 | 12833 | 12848 | CCAGACCCATGCCGAC | 49 | 1337 |
| 903747 | 812 | 827 | 12903 | 12918 | AAAGCGGCTGTGATTC | 29 | 1338 |
| 903779 | 851 | 866 | 12942 | 12957 | TTCTTTCCGTAGTCCA | 38 | 1339 |
| 903811 | 932 | 947 | 13023 | 13038 | TCACCCAAAAACTCCC | 72 | 1340 |
| 903843 | 1010 | 1025 | 13101 | 13116 | AGGGCACGGATGTCCT | 3 | 1341 |
| 903875 | 1085 | 1100 | 13176 | 13191 | GAGATTGGCTCAGTGA | 69 | 1342 |
| 903907 | 1128 | 1143 | 13219 | 13234 | GCTGGGTTCATTAACC | 6 | 1343 |
| 903939 | 1230 | 1245 | 13321 | 13336 | TAAGTGCTTTGATTCG | 89 | 1344 |
| 903971 | 1346 | 1361 | 13437 | 13452 | AGTTCTTGGTCCGCCT | 52 | 1345 |
| 904003 | 1742 | 1757 | 13833 | 13848 | CACCCTCTTTATCCCC | 85 | 1346 |
| 904035 | 1800 | 1815 | 13891 | 13906 | CTGTGCTCAGCTATGG | 73 | 1347 |
| 904067 | 1928 | 1943 | 14019 | 14034 | CTTTAGTCTAAAGTAA | 16 | 1348 |
| 904099 | 2334 | 2349 | 14425 | 14440 | ACTCTTGGGCTTTCTC | 91 | 1349 |
| 904131 | 2414 | 2429 | 14505 | 14520 | TTCATTCTTCGGAGGA | 63 | 1350 |
| 904163 | 2512 | 2527 | 14603 | 14618 | CATCAGGAAGCCGCTG | 23 | 1351 |
| 904195 | 2612 | 2627 | 14703 | 14718 | GCCATGGCCCACCACC | 0 | 1352 |
| 904227 | 2744 | 2759 | 14835 | 14850 | GCTTTCATGCTAATTT | 40 | 1353 |
| 904259 | 2806 | 2821 | 14897 | 14912 | GGTCAATCCTGGGCGG | 58 | 1354 |
| 904323 | N/A | N/A | 1375 | 1390 | CTCATGATTGCAAAGC | 69 | 1355 |
| 904355 | N/A | N/A | 869 | 884 | CTCAGCAGTCAAAACC | 24 | 1356 |
| 904387 | N/A | N/A | 2515 | 2530 | GTTCCTAGAAGAAGCC | 25 | 1357 |
| 904419 | N/A | N/A | 3411 | 3426 | GAGGGTATATGAAAGT | 59 | 1358 |
| 904451 | N/A | N/A | 4351 | 4366 | TAGCTGGTGATAGCCA | 27 | 1359 |
| 904483 | N/A | N/A | 4735 | 4750 | TGTTGCACCCTTGAGG | 23 | 1360 |
| 904515 | N/A | N/A | 5064 | 5079 | TCATTTGCTAGGTGCC | 84 | 1361 |
| 904547 | N/A | N/A | 5172 | 5187 | GGTCAACCTCCTCTCC | 3 | 1362 |
| 904579 | N/A | N/A | 5304 | 5319 | TACATTCCCACAGGGC | 23 | 1363 |
| 904611 | N/A | N/A | 5379 | 5394 | CGCCAGGTCACACAGA | 69 | 1364 |
| 904643 | N/A | N/A | 5491 | 5506 | GGCCCTATTGTGTGGC | 0 | 1365 |
| 904675 | N/A | N/A | 5683 | 5698 | GATTTTTCTTTGACCG | 95 | 1366 |
| 904707 | N/A | N/A | 5767 | 5782 | CACGAAGCCTCCTCCA | 38 | 1367 |
| 904739 | N/A | N/A | 5808 | 5823 | TTCACCCGATAAACCT | 69 | 1368 |
| 904771 | N/A | N/A | 5869 | 5884 | ACCCAAACAGGCAGTT | 2 | 1369 |
| 904803 | N/A | N/A | 5934 | 5949 | GTATTCGGAGACCTCC | 25 | 1370 |
| 904835 | N/A | N/A | 5966 | 5981 | AACCTGGGCAAGGCTA | 21 | 1371 |
| 904867 | N/A | N/A | 6140 | 6155 | TGCTTACTCCACACCT | 65 | 1372 |
| 904899 | N/A | N/A | 6210 | 6225 | CCATGTTTGGTACAAA | 61 | 1373 |
| 904931 | N/A | N/A | 6262 | 6277 | CTTGTCTCACTAAACC | 30 | 1374 |
| 904963 | N/A | N/A | 6331 | 6346 | TAAGACCAGTGAGATC | 41 | 1375 |
| 904995 | N/A | N/A | 6403 | 6418 | AAACCACCTGTAGGGA | 42 | 1376 |
| 905027 | N/A | N/A | 6543 | 6558 | ATGGGTACTTCTGTTA | 79 | 1377 |
| 905059 | N/A | N/A | 6604 | 6619 | TAGAACAGCTGTAACC | 48 | 1378 |
| 905091 | N/A | N/A | 6682 | 6697 | GCTGGTGGATATAAAA | 0 | 1379 |
| 905123 | N/A | N/A | 6795 | 6810 | GAGCGATTGTCTTGTT | 89 | 1380 |
| 905155 | N/A | N/A | 6880 | 6895 | TTGCCGTGGCAACTCT | 0 | 1381 |
| 905187 | N/A | N/A | 7038 | 7053 | AGTTTTTCCTCAGTCC | 56 | 1382 |
| 905219 | N/A | N/A | 7160 | 7175 | AGGCACCTCCATGTTG | 11 | 1383 |
| 905251 | N/A | N/A | 7256 | 7271 | GGAGATTCCTCCTGCT | 0 | 1384 |
| 905283 | N/A | N/A | 7340 | 7355 | CCCTTATAGCTTACCT | 64 | 1385 |
| 905315 | N/A | N/A | 7476 | 7491 | GAGAGTCACCGCCCAA | 65 | 1386 |
| 905347 | N/A | N/A | 7844 | 7859 | TCTTGCCGTGCACACA | 26 | 1387 |
| 905379 | N/A | N/A | 7940 | 7955 | GTGGTTTGCAGGGATC | 82 | 1388 |
| 905411 | N/A | N/A | 8006 | 8021 | GGTCTACAAAGAACTC | 42 | 1389 |
| 905443 | N/A | N/A | 8089 | 8104 | GGACTGCTCCCTGTAA | 17 | 1390 |
| 905475 | N/A | N/A | 8176 | 8191 | GATGTGTTTAGGCATT | 84 | 1391 |
| 905507 | N/A | N/A | 8329 | 8344 | ATCATTGGGTTATGAA | 15 | 1392 |
| 905539 | N/A | N/A | 8387 | 8402 | ACATGCCTGTTGGGTC | 48 | 1393 |
| 905571 | N/A | N/A | 8461 | 8476 | AGCTCAGCACCAACAT | 22 | 1394 |
| 905603 | N/A | N/A | 8632 | 8647 | GACTCCAACCCTTTTG | 19 | 1395 |
| 905635 | N/A | N/A | 8745 | 8760 | AATTCTATTAGAGGGC | 80 | 1396 |
| 905667 | N/A | N/A | 8832 | 8847 | GAAGCTTTAAACTCAG | 83 | 1397 |
| 905699 | N/A | N/A | 8894 | 8909 | ACTTGTTTTATGGAGT | 30 | 1398 |
| 905731 | N/A | N/A | 8961 | 8976 | GAGTGCATAACAGCCA | 9 | 1399 |

TABLE 21
Inhibition of APOL1 mRNA by 3-10-3 cEt gapmers targeting SEQ ID NO: 1 and 2

| | SEQ | SEQ | SEQ | SEQ | | | |
|---|---|---|---|---|---|---|---|
| | ID: 1 | ID: 1 | ID: 2 | ID: 2 | | % | SEQ |
| Compound | Start | Stop | Start | Stop | | inhi- | ID |
| Number | Site | Site | Site | Site | Sequence | bition | NO |
| 793406 | N/A | N/A | 8306 | 8321 | GTTCAAAAGCAGCATT | 84 | 13 |
| 903436 | 41 | 56 | 534 | 549 | ACAGGTCCTCCAGTCC | 37 | 1400 |
| 903468 | 154 | 169 | 2364 | 2379 | TGTCGCTGCAGGGCCT | 35 | 1401 |
| 903500 | 263 | 278 | 12661 | 12676 | TTTTGTTGCACCCTCG | 84 | 1402 |
| 903532 | 346 | 361 | N/A | N/A | TGCTCTCTGGGTCCAT | 8 | 1403 |
| 903628 | 570 | 585 | N/A | N/A | CCAGTTTCTGTACTGC | 23 | 1404 |
| 903660 | 642 | 657 | 12733 | 12748 | ATCTGCAAGGGCACGG | 39 | 1405 |
| 903692 | 680 | 695 | 12771 | 12786 | TTGGCGATGGTGGTGC | 0 | 1406 |
| 903724 | 758 | 773 | 12849 | 12864 | CCCTCTGTGAAGGGTG | 0 | 1407 |
| 903756 | 824 | 839 | 12915 | 12930 | GTAATCCCGGTCAAAG | 41 | 1408 |
| 903788 | 862 | 877 | 12953 | 12968 | GTGTCCACCACTTCTT | 18 | 1409 |
| 903820 | 968 | 983 | 13059 | 13074 | GTATTGCCAGCTAAGG | 94 | 1410 |
| 903852 | 1032 | 1047 | 13123 | 13138 | AAGATTGGCTCTGGCT | 74 | 1411 |
| 903884 | 1097 | 1112 | 13188 | 13203 | CCGCTTTCAGCTGAGA | 39 | 1412 |
| 903916 | 1158 | 1173 | 13249 | 13264 | GAGCTTGACTCCTCTG | 5 | 1413 |
| 903948 | 1241 | 1256 | 13332 | 13347 | GCCCCCTCATGTAAGT | 11 | 1414 |
| 903980 | 1382 | 1397 | 13473 | 13488 | ATATCTCTCCTGGTGG | 69 | 1415 |
| 904012 | 1755 | 1770 | 13846 | 13861 | ATAAACTTTACCTCAC | 62 | 1416 |
| 904044 | 1842 | 1857 | 13933 | 13948 | CTTCTCCTTGCTGCAC | 84 | 1417 |
| 904076 | 1949 | 1964 | 14040 | 14055 | CACCCGGCCCCCCAAT | 36 | 1418 |
| 904108 | 2348 | 2363 | 14439 | 14454 | ATCCAACTGTTCTAAC | 64 | 1419 |
| 904140 | 2486 | 2501 | 14577 | 14592 | ATATGCCCCCAGGAGG | 40 | 1420 |
| 904172 | 2527 | 2542 | 14618 | 14633 | CACCCCAATGACCATC | 63 | 1421 |
| 904204 | 2679 | 2694 | 14770 | 14785 | TGGTTCTCACATACTC | 91 | 1422 |
| 904236 | 2777 | 2792 | 14868 | 14883 | CTAGAGATCTGAGCTT | 14 | 1423 |
| 904268 | 2846 | 2861 | 14937 | 14952 | CAGCTTGATGAGTAGG | 21 | 1424 |
| 904300 | N/A | N/A | 2354 | 2369 | GGGCCTCCTCCTTGAG | 2 | 1425 |
| 904364 | N/A | N/A | 1115 | 1130 | AAGTTGGTGCTCAGAC | 8 | 1426 |
| 904396 | N/A | N/A | 2572 | 2587 | ACAGCGGGTCCTCCCT | 60 | 1427 |
| 904428 | N/A | N/A | 3809 | 3824 | TCGCATAAAACTTTGC | 43 | 1428 |
| 904460 | N/A | N/A | 4464 | 4479 | CAGAGGACGGGCAGCC | 0 | 1429 |
| 904492 | N/A | N/A | 4914 | 4929 | AGTCCATCCGGGTTCT | 27 | 1430 |
| 904524 | N/A | N/A | 5074 | 5089 | CCCACTTGAGTCATTT | 67 | 1431 |
| 904556 | N/A | N/A | 5201 | 5216 | AGAGCGGGAGGTGACA | 25 | 1432 |
| 904588 | N/A | N/A | 5314 | 5329 | TCAGGCCCGATACATT | 0 | 1433 |
| 904620 | N/A | N/A | 5415 | 5430 | ATTATTCTCATGGTAC | 73 | 1434 |
| 904652 | N/A | N/A | 5500 | 5515 | CCTTAGGGAGGCCCTA | 16 | 1435 |
| 904684 | N/A | N/A | 5702 | 5717 | AAAATTCTATTGGGCC | 0 | 1436 |
| 904716 | N/A | N/A | 5779 | 5794 | TTTTCACCATAGCACG | 87 | 1437 |
| 904748 | N/A | N/A | 5828 | 5843 | GTCCTTACTGCAGTTT | 95 | 1438 |
| 904780 | N/A | N/A | 5891 | 5906 | CAGGGATTTTCCAACA | 77 | 1439 |
| 904812 | N/A | N/A | 5943 | 5958 | GTCTCACCTGTATTCG | 34 | 1440 |
| 904844 | N/A | N/A | 6022 | 6037 | TTGCACTAAAAGCTGA | 62 | 1441 |
| 904876 | N/A | N/A | 6153 | 6168 | CCAGAAATCCTTATGC | 35 | 1442 |
| 904908 | N/A | N/A | 6223 | 6238 | GTTCCATGTATGCCCA | 85 | 1443 |
| 904940 | N/A | N/A | 6280 | 6295 | ACACTCAATCATACCC | 64 | 1444 |
| 904972 | N/A | N/A | 6341 | 6356 | CCAATTCAGCTAAGAC | 73 | 1445 |
| 905004 | N/A | N/A | 6414 | 6429 | AGGAGTTGCTGAAACC | 69 | 1446 |
| 905036 | N/A | N/A | 6553 | 6568 | GTCATATCAGATGGGT | 92 | 1447 |
| 905068 | N/A | N/A | 6616 | 6631 | CTACGAGGCCTTTAGA | 23 | 1448 |
| 905100 | N/A | N/A | 6721 | 6736 | CCTCTGGCACTAAATC | 40 | 1449 |
| 905132 | N/A | N/A | 6804 | 6819 | TGGCTGGGCGAGCGAT | 38 | 1450 |
| 905164 | N/A | N/A | 6889 | 6904 | CTGACTTGGTTGCCGT | 60 | 1451 |
| 905196 | N/A | N/A | 7080 | 7095 | GGGCCTGTTATTAAAC | 0 | 1452 |
| 905228 | N/A | N/A | 7169 | 7184 | TGATCCTTGAGGCACC | 28 | 1453 |
| 905260 | N/A | N/A | 7270 | 7285 | AACTACCATGCAAAGG | 38 | 1454 |
| 905292 | N/A | N/A | 7380 | 7395 | ACTCCTTATGTTTTGA | 94 | 1455 |
| 905324 | N/A | N/A | 7485 | 7500 | CCAGACAGCGAGAGTC | 78 | 1456 |
| 905356 | N/A | N/A | 7862 | 7877 | GCATGATGTAAAATTG | 6 | 1457 |
| 905388 | N/A | N/A | 7975 | 7990 | AGGATTACTCCTGAAG | 0 | 1458 |
| 905420 | N/A | N/A | 8017 | 8032 | AAATAATGGTAGGTCT | 77 | 1459 |
| 905452 | N/A | N/A | 8120 | 8135 | GGTATATTCCTGACCA | 25 | 1460 |
| 905484 | N/A | N/A | 8185 | 8200 | TGGAATCCAGATGTGT | 65 | 1461 |
| 905516 | N/A | N/A | 8340 | 8355 | AATATCAACACATCAT | 82 | 1462 |
| 905548 | N/A | N/A | 8409 | 8424 | CCAGTGATCACTTCCA | 78 | 1463 |
| 905580 | N/A | N/A | 8517 | 8532 | AACATTGAAACACCAG | 94 | 1464 |
| 905612 | N/A | N/A | 8665 | 8680 | AGCTTCCATAAGCCAG | 12 | 1465 |
| 905644 | N/A | N/A | 8756 | 8771 | GGTAGGGCTCTAATTC | 60 | 1466 |
| 905676 | N/A | N/A | 8867 | 8882 | TAGAGGGAATTGTGTG | 61 | 1467 |
| 905708 | N/A | N/A | 8907 | 8922 | GCTGTGATGTGGGACT | 89 | 1468 |
| 905740 | N/A | N/A | 8971 | 8986 | GAAAGTGTGGGAGTGC | 8 | 1469 |

TABLE 22
Inhibition of APOL1 mRNA by 3-10-3 cEt gapmers targeting SEQ ID NO: 1 and 2

| | SEQ | SEQ | SEQ | SEQ | | | |
|---|---|---|---|---|---|---|---|
| | ID: 1 | ID: 1 | ID: 2 | ID: 2 | | % | SEQ |
| Compound | Start | Stop | Start | Stop | | inhi- | ID |
| Number | Site | Site | Site | Site | Sequence | bition | NO |
| 793406 | N/A | N/A | 8306 | 8321 | GTTCAAAAGCAGCATT | 82 | 13 |
| 903437 | 42 | 57 | 535 | 550 | GACAGGTCCTCCAGTC | 14 | 1470 |
| 903469 | 155 | 170 | 2365 | 2380 | ATGTCGCTGCAGGGCC | 18 | 1471 |
| 903533 | 349 | 364 | N/A | N/A | TACTGCTCTCTGGGTC | 33 | 1472 |
| 903629 | 571 | 586 | 12662 | 12677 | ACCAGTTTCTGTACTG | 4 | 1473 |
| 903661 | 643 | 658 | 12734 | 12749 | CATCTGCAAGGGCACG | 43 | 1474 |
| 903693 | 681 | 696 | 12772 | 12787 | ATTGGCGATGGTGGTG | 27 | 1475 |
| 903725 | 759 | 774 | 12850 | 12865 | TCCCTCTGTGAAGGGT | 0 | 1476 |
| 903757 | 827 | 842 | 12918 | 12933 | CTGGTAATCCCGGTCA | 63 | 1477 |
| 903789 | 863 | 878 | 12954 | 12969 | TGTGTCCACCACTTCT | 39 | 1478 |
| 903821 | 969 | 984 | 13060 | 13075 | AGTATTGCCAGCTAAG | 98 | 1479 |
| 903853 | 1033 | 1048 | 13124 | 13139 | GAAGATTGGCTCTGGC | 91 | 1480 |
| 903885 | 1098 | 1113 | 13189 | 13204 | ACCGCTTTCAGCTGAG | 10 | 1481 |
| 903917 | 1159 | 1174 | 13250 | 13265 | TGAGCTTGACTCCTCT | 6 | 1482 |
| 903949 | 1242 | 1257 | 13333 | 13348 | TGCCCCCTCATGTAAG | 46 | 1483 |
| 903981 | 1384 | 1399 | 13475 | 13490 | GCATATCTCTCCTGGT | 81 | 1484 |
| 904013 | 1764 | 1779 | 13855 | 13870 | CTCAGTTCCATAAACT | 87 | 1485 |
| 904045 | 1844 | 1859 | 13935 | 13950 | GCCTTCTCCTTGCTGC | 57 | 1486 |
| 904077 | 1950 | 1965 | 14041 | 14056 | ACACCCGGCCCCCCAA | 49 | 1487 |
| 904109 | 2349 | 2364 | 14440 | 14455 | TATCCAACTGTTCTAA | 68 | 1488 |
| 904141 | 2487 | 2502 | 14578 | 14593 | GATATGCCCCCAGGAG | 84 | 1489 |
| 904173 | 2528 | 2543 | 14619 | 14634 | CCACCCCAATGACCAT | 67 | 1490 |
| 904205 | 2680 | 2695 | 14771 | 14786 | TTGGTTCTCACATACT | 84 | 1491 |
| 904237 | 2778 | 2793 | 14869 | 14884 | TCTAGAGATCTGAGCT | 20 | 1492 |
| 904269 | 2847 | 2862 | 14938 | 14953 | CCAGCTTGATGAGTAG | 30 | 1493 |
| 904365 | N/A | N/A | 1116 | 1131 | CAAGTTGGTGCTCAGA | 0 | 1494 |
| 904397 | N/A | N/A | 2583 | 2598 | TCAACTAGGATACAGC | 82 | 1495 |
| 904429 | N/A | N/A | 3817 | 3832 | ATCCTTCTTCGCATAA | 80 | 1496 |
| 904461 | N/A | N/A | 4467 | 4482 | AATCAGAGGACGGGCA | 5 | 1497 |
| 904493 | N/A | N/A | 4916 | 4931 | CTAGTCCATCCGGGTT | 49 | 1498 |
| 904525 | N/A | N/A | 5075 | 5090 | CCCCACTTGAGTCATT | 57 | 1499 |
| 904557 | N/A | N/A | 5202 | 5217 | CAGAGCGGGAGGTGAC | 24 | 1500 |
| 904589 | N/A | N/A | 5315 | 5330 | ATCAGGCCCGATACAT | 0 | 1501 |
| 904621 | N/A | N/A | 5436 | 5451 | CTCAAGACAACATGGG | 43 | 1502 |
| 904653 | N/A | N/A | 5501 | 5516 | CCCTTAGGGAGGCCCT | 13 | 1503 |
| 904685 | N/A | N/A | 5721 | 5736 | CTTACTCAATTAACTC | 77 | 1504 |
| 904717 | N/A | N/A | 5782 | 5797 | ACTTTTTCACCATAGC | 94 | 1505 |
| 904749 | N/A | N/A | 5829 | 5844 | TGTCCTTACTGCAGTT | 82 | 1506 |
| 904781 | N/A | N/A | 5892 | 5907 | CCAGGGATTTTCCAAC | 69 | 1507 |
| 904813 | N/A | N/A | 5944 | 5959 | GGTCTCACCTGTATTC | 32 | 1508 |
| 904845 | N/A | N/A | 6023 | 6038 | TTTGCACTAAAAGCTG | 67 | 1509 |
| 904877 | N/A | N/A | 6154 | 6169 | CCCAGAAATCCTTATG | 37 | 1510 |
| 904909 | N/A | N/A | 6224 | 6239 | CGTTCCATGTATGCCC | 93 | 1511 |
| 904941 | N/A | N/A | 6281 | 6296 | CACACTCAATCATACC | 22 | 1512 |
| 904973 | N/A | N/A | 6343 | 6358 | GGCCAATTCAGCTAAG | 7 | 1513 |
| 905069 | N/A | N/A | 6617 | 6632 | CCTACGAGGCCTTTAG | 59 | 1514 |
| 905101 | N/A | N/A | 6722 | 6737 | ACCTCTGGCACTAAAT | 59 | 1515 |
| 905133 | N/A | N/A | 6805 | 6820 | TTGGCTGGGCGAGCGA | 61 | 1516 |
| 905165 | N/A | N/A | 6890 | 6905 | GCTGACTTGGTTGCCG | 10 | 1517 |
| 905197 | N/A | N/A | 7081 | 7096 | TGGGCCTGTTATTAAA | 14 | 1518 |
| 905229 | N/A | N/A | 7170 | 7185 | CTGATCCTTGAGGCAC | 72 | 1519 |
| 905261 | N/A | N/A | 7271 | 7286 | CAACTACCATGCAAAG | 53 | 1520 |
| 905293 | N/A | N/A | 7381 | 7396 | AACTCCTTATGTTTTG | 89 | 1521 |
| 905325 | N/A | N/A | 7486 | 7501 | TCCAGACAGCGAGAGT | 83 | 1522 |
| 905357 | N/A | N/A | 7863 | 7878 | GGCATGATGTAAAATT | 33 | 1523 |
| 905389 | N/A | N/A | 7977 | 7992 | GCAGGATTACTCCTGA | 10 | 1524 |
| 905421 | N/A | N/A | 8053 | 8068 | ACAGTGAAACAAGCAA | 93 | 1525 |
| 905453 | N/A | N/A | 8121 | 8136 | TGGTATATTCCTGACC | 35 | 1526 |
| 905485 | N/A | N/A | 8201 | 8216 | CCTTAATGTAAATTCC | 90 | 1527 |
| 905517 | N/A | N/A | 8345 | 8360 | ATGTGAATATCAACAC | 74 | 1528 |
| 905549 | N/A | N/A | 8410 | 8425 | CCCAGTGATCACTTCC | 78 | 1529 |
| 905581 | N/A | N/A | 8518 | 8533 | GAACATTGAAACACCA | 93 | 1530 |
| 905613 | N/A | N/A | 8666 | 8681 | CAGCTTCCATAAGCCA | 30 | 1531 |
| 905645 | N/A | N/A | 8767 | 8782 | GAGATCACAAGGGTAG | 98 | 1532 |
| 905677 | N/A | N/A | 8868 | 8883 | ATAGAGGGAATTGTGT | 45 | 1533 |
| 905709 | N/A | N/A | 8908 | 8923 | AGCTGTGATGTGGGAC | 63 | 1534 |
| 905741 | N/A | N/A | 8978 | 8993 | GTTGGAGGAAAGTGTG | 19 | 1535 |
| 905773 | N/A | N/A | 9795 | 9810 | TCTGACATAAGCCCAG | 0 | 1536 |
| 905805 | N/A | N/A | 10425 | 10440 | AGAACCACCTATATAA | 60 | 1537 |

TABLE 23
Inhibition of APOL1 mRNA by 3-10-3 cEt gapmers targeting SEQ ID NO: 1 and 2

| | SEQ | SEQ | SEQ | SEQ | | | |
|---|---|---|---|---|---|---|---|
| | ID: 1 | ID: 1 | ID: 2 | ID: 2 | | % | SEQ |
| Compound | Start | Stop | Start | Stop | | inhi- | ID |
| Number | Site | Site | Site | Site | Sequence | bition | NO |
| 793406 | N/A | N/A | 8306 | 8321 | GTTCAAAAGCAGCATT | 88 | 13 |
| 903422 | 20 | 35 | 513 | 528 | ATATACCGAGGAATTC | 7 | 1538 |
| 903454 | 77 | 92 | 570 | 585 | ATCCCACCTCCAGTTA | 49 | 1539 |
| 903486 | 218 | 233 | 4511 | 4526 | CCAAGGAAAAGTGCAC | 47 | 1540 |
| 903518 | 297 | 312 | 4772 | 4787 | TTGAGGATCTCCAGTA | 55 | 1541 |
| 903614 | 543 | 558 | 12634 | 12649 | GTGCCAGTTTTTGTCT | 0 | 1542 |
| 903646 | 625 | 640 | 12716 | 12731 | GCCTTCTTATGTTATC | 30 | 1543 |
| 903678 | 665 | 680 | 12756 | 12771 | CCTTTGTGGACCTTCT | 71 | 1544 |
| 903710 | 737 | 752 | 12828 | 12843 | CCCATGCCGACGAGGG | 11 | 1545 |
| 903742 | 807 | 822 | 12898 | 12913 | GGCTGTGATTCCCAAC | 28 | 1546 |
| 903774 | 845 | 860 | 12936 | 12951 | CCGTAGTCCATGGTAC | 11 | 1547 |
| 903806 | 902 | 917 | 12993 | 13008 | TTGTCAAGGCTTTTGA | 69 | 1548 |
| 903838 | 1004 | 1019 | 13095 | 13110 | CGGATGTCCTTCCCAA | 23 | 1549 |
| 903870 | 1080 | 1095 | 13171 | 13186 | TGGCTCAGTGACCCGG | 31 | 1550 |
| 903902 | 1122 | 1137 | 13213 | 13228 | TTCATTAACCCTCTCC | 74 | 1551 |
| 903934 | 1208 | 1223 | 13299 | 13314 | AGGTAGACTACATCCA | 40 | 1552 |
| 903966 | 1341 | 1356 | 13432 | 13447 | TTGGTCCGCCTGCAGA | 64 | 1553 |
| 903998 | 1708 | 1723 | 13799 | 13814 | TTGGGTCAAAAGCGAT | 92 | 1554 |
| 904030 | 1794 | 1809 | 13885 | 13900 | TCAGCTATGGAAATGC | 93 | 1555 |
| 904062 | 1921 | 1936 | 14012 | 14027 | CTAAAGTAAACTGCTT | 63 | 1556 |
| 904094 | 2279 | 2294 | 14370 | 14385 | GTTCCTTCAAGCCTCC | 92 | 1557 |
| 904126 | 2408 | 2423 | 14499 | 14514 | CTTCGGAGGACATTGA | 70 | 1558 |
| 904158 | 2506 | 2521 | 14597 | 14612 | GAAGCCGCTGCCTGAC | 78 | 1559 |
| 904190 | 2594 | 2609 | 14685 | 14700 | CCCTTCAGTGTTCAAG | 89 | 1560 |
| 904222 | 2720 | 2735 | 14811 | 14826 | TTTACTTACCGGGTAA | 22 | 1561 |
| 904254 | 2801 | 2816 | 14892 | 14907 | ATCCTGGGCGGCGACA | 84 | 1562 |
| 904318 | N/A | N/A | 1345 | 1360 | AGGCACCATTCTGCAA | 29 | 1563 |
| 904350 | N/A | N/A | 820 | 835 | TGAGCTGTTTCCCCAA | 39 | 1564 |
| 904382 | N/A | N/A | 2474 | 2489 | CCAGTCCAATTGTGCA | 43 | 1565 |
| 904414 | N/A | N/A | 2828 | 2843 | TGTTCACTGTGTGATC | 74 | 1566 |
| 904446 | N/A | N/A | 4306 | 4321 | GCCTCTTACATGTGTC | 52 | 1567 |
| 904478 | N/A | N/A | 4693 | 4708 | TGTGAGCCACCAGTGG | 0 | 1568 |
| 904510 | N/A | N/A | 5024 | 5039 | GGGCCGTGTCACCCTA | 8 | 1569 |
| 904542 | N/A | N/A | 5111 | 5126 | CCCCCCCGCTGATTCC | 19 | 1570 |
| 904574 | N/A | N/A | 5241 | 5256 | ACCAGCCTCAGGTGGA | 12 | 1571 |
| 904606 | N/A | N/A | 5353 | 5368 | CAAAGGACAGACCGGG | 64 | 1572 |
| 904638 | N/A | N/A | 5464 | 5479 | AGGCCAGGTAGCCGTG | 9 | 1573 |
| 904670 | N/A | N/A | 5659 | 5674 | TTAGATGACTGAACTC | 75 | 1574 |
| 904702 | N/A | N/A | 5762 | 5777 | AGCCTCCTCCAGTTTG | 32 | 1575 |
| 904734 | N/A | N/A | 5802 | 5817 | CGATAAACCTTGTCTC | 44 | 1576 |
| 904766 | N/A | N/A | 5858 | 5873 | CAGTTTTGTAAGTGCA | 97 | 1577 |
| 904798 | N/A | N/A | 5929 | 5944 | CGGAGACCTCCCTAAA | 12 | 1578 |
| 904830 | N/A | N/A | 5961 | 5976 | GGGCAAGGCTAAGTTC | 56 | 1579 |
| 904862 | N/A | N/A | 6112 | 6127 | CCAGCAAAGACAAGAA | 87 | 1580 |
| 904894 | N/A | N/A | 6202 | 6217 | GGTACAAAACTGCATT | 78 | 1581 |
| 904926 | N/A | N/A | 6256 | 6271 | TCACTAAACCCCACAC | 0 | 1582 |
| 904958 | N/A | N/A | 6325 | 6340 | CAGTGAGATCCAACTC | 40 | 1583 |
| 904990 | N/A | N/A | 6375 | 6390 | ATGGGCCCACAGGATC | 0 | 1584 |
| 905022 | N/A | N/A | 6538 | 6553 | TACTTCTGTTAGATAC | 92 | 1585 |
| 905054 | N/A | N/A | 6595 | 6610 | TGTAACCCCCTGAAAC | 17 | 1586 |
| 905086 | N/A | N/A | 6641 | 6656 | TGAAACATTCCTGGAC | 85 | 1587 |
| 905118 | N/A | N/A | 6743 | 6758 | ACCCAGGTTTGGATGG | 33 | 1588 |
| 905150 | N/A | N/A | 6875 | 6890 | GTGGCAACTCTGTAAG | 10 | 1589 |
| 905182 | N/A | N/A | 6989 | 7004 | GGCTGAGTGCTCTCGG | 60 | 1590 |
| 905214 | N/A | N/A | 7119 | 7134 | AGGGTACACGGCTCTC | 45 | 1591 |
| 905246 | N/A | N/A | 7240 | 7255 | GGTCTTGGGCACTCTC | 79 | 1592 |
| 905278 | N/A | N/A | 7301 | 7316 | ATAATGTCTCAAACTC | 77 | 1593 |
| 905310 | N/A | N/A | 7470 | 7485 | CACCGCCCAAAACCAT | 25 | 1594 |
| 905342 | N/A | N/A | 7838 | 7853 | CGTGCACACACAAGAG | 0 | 1595 |
| 905374 | N/A | N/A | 7923 | 7938 | GGGAATTATGGAATTG | 83 | 1596 |
| 905406 | N/A | N/A | 7996 | 8011 | GAACTCAAGTCAGTAC | 73 | 1597 |
| 905438 | N/A | N/A | 8083 | 8098 | CTCCCTGTAATCACAC | 40 | 1598 |
| 905470 | N/A | N/A | 8168 | 8183 | TAGGCATTCAGAATTT | 71 | 1599 |
| 905502 | N/A | N/A | 8313 | 8328 | ATTATTGGTTCAAAAG | 35 | 1600 |
| 905534 | N/A | N/A | 8382 | 8397 | CCTGTTGGGTCAAACA | 45 | 1601 |
| 905566 | N/A | N/A | 8452 | 8467 | CCAACATGAAGTGAGC | 79 | 1602 |
| 905598 | N/A | N/A | 8622 | 8637 | CTTTTGGCACCTTCAC | 83 | 1603 |
| 905630 | N/A | N/A | 8740 | 8755 | TATTAGAGGGCTAGTG | 55 | 1604 |
| 905662 | N/A | N/A | 8825 | 8840 | TAAACTCAGGTGACTA | 60 | 1605 |
| 905694 | N/A | N/A | 8885 | 8900 | ATGGAGTCATTAGTGC | 85 | 1606 |
| 905726 | N/A | N/A | 8954 | 8969 | TAACAGCCATTGCATA | 6 | 1607 |

TABLE 24
Inhibition of APOL1 mRNA by 3-10-3 cEt gapmers targeting SEQ ID NO: 1 and 2

| | SEQ | SEQ | SEQ | SEQ | | | |
|---|---|---|---|---|---|---|---|
| | ID: 1 | ID: 1 | ID: 2 | ID: 2 | | % | SEQ |
| Compound | Start | Stop | Start | Stop | | inhi- | ID |
| Number | Site | Site | Site | Site | Sequence | bition | NO |
| 793406 | N/A | N/A | 8306 | 8321 | GTTCAAAAGCAGCATT | 87 | 13 |
| 903423 | 21 | 36 | 514 | 529 | GATATACCGAGGAATT | 17 | 1608 |
| 903455 | 78 | 93 | 571 | 586 | GATCCCACCTCCAGTT | 29 | 1609 |
| 903487 | 220 | 235 | 4513 | 4528 | CACCAAGGAAAAGTGC | 3 | 1610 |
| 903519 | 300 | 315 | 4775 | 4790 | ACTTTGAGGATCTCCA | 66 | 1611 |
| 903615 | 544 | 559 | 12635 | 12650 | CGTGCCAGTTTTTGTC | 0 | 1612 |
| 903647 | 626 | 641 | 12717 | 12732 | AGCCTTCTTATGTTAT | 44 | 1613 |
| 903679 | 666 | 681 | 12757 | 12772 | GCCTTTGTGGACCTTC | 77 | 1614 |
| 903711 | 738 | 753 | 12829 | 12844 | ACCCATGCCGACGAGG | 19 | 1615 |
| 903743 | 808 | 823 | 12899 | 12914 | CGGCTGTGATTCCCAA | 19 | 1616 |
| 903775 | 846 | 861 | 12937 | 12952 | TCCGTAGTCCATGGTA | 5 | 1617 |
| 903807 | 907 | 922 | 12998 | 13013 | TCAATTTGTCAAGGCT | 94 | 1618 |
| 903839 | 1005 | 1020 | 13096 | 13111 | ACGGATGTCCTTCCCA | 40 | 1619 |
| 903871 | 1081 | 1096 | 13172 | 13187 | TTGGCTCAGTGACCCG | 44 | 1620 |
| 903903 | 1124 | 1139 | 13215 | 13230 | GGTTCATTAACCCTCT | 39 | 1621 |
| 903935 | 1209 | 1224 | 13300 | 13315 | GAGGTAGACTACATCC | 29 | 1622 |
| 903967 | 1342 | 1357 | 13433 | 13448 | CTTGGTCCGCCTGCAG | 42 | 1623 |
| 903999 | 1709 | 1724 | 13800 | 13815 | TTTGGGTCAAAAGCGA | 89 | 1624 |
| 904031 | 1796 | 1811 | 13887 | 13902 | GCTCAGCTATGGAAAT | 77 | 1625 |
| 904063 | 1923 | 1938 | 14014 | 14029 | GTCTAAAGTAAACTGC | 88 | 1626 |
| 904095 | 2281 | 2296 | 14372 | 14387 | TGGTTCCTTCAAGCCT | 35 | 1627 |
| 904127 | 2409 | 2424 | 14500 | 14515 | TCTTCGGAGGACATTG | 64 | 1628 |
| 904159 | 2507 | 2522 | 14598 | 14613 | GGAAGCCGCTGCCTGA | 80 | 1629 |
| 904191 | 2595 | 2610 | 14686 | 14701 | GCCCTTCAGTGTTCAA | 47 | 1630 |
| 904223 | 2721 | 2736 | 14812 | 14827 | GTTTACTTACCGGGTA | 83 | 1631 |
| 904255 | 2802 | 2817 | 14893 | 14908 | AATCCTGGGCGGCGAC | 79 | 1632 |
| 904319 | N/A | N/A | 1347 | 1362 | ACAGGCACCATTCTGC | 38 | 1633 |
| 904351 | N/A | N/A | 825 | 840 | CCATCTGAGCTGTTTC | 30 | 1634 |
| 904383 | N/A | N/A | 2475 | 2490 | CCCAGTCCAATTGTGC | 34 | 1635 |
| 904415 | N/A | N/A | 2885 | 2900 | TTGCTGTAAGGGACAA | 53 | 1636 |
| 904447 | N/A | N/A | 4310 | 4325 | CAGAGCCTCTTACATG | 47 | 1637 |
| 904479 | N/A | N/A | 4694 | 4709 | ATGTGAGCCACCAGTG | 46 | 1638 |
| 904511 | N/A | N/A | 5025 | 5040 | TGGGCCGTGTCACCCT | 9 | 1639 |
| 904543 | N/A | N/A | 5112 | 5127 | CCCCCCCCGCTGATTC | 43 | 1640 |
| 904575 | N/A | N/A | 5243 | 5258 | GGACCAGCCTCAGGTG | 0 | 1641 |
| 904607 | N/A | N/A | 5354 | 5369 | GCAAAGGACAGACCGG | 32 | 1642 |
| 904639 | N/A | N/A | 5465 | 5480 | CAGGCCAGGTAGCCGT | 22 | 1643 |
| 904671 | N/A | N/A | 5660 | 5675 | TTTAGATGACTGAACT | 69 | 1644 |
| 904703 | N/A | N/A | 5763 | 5778 | AAGCCTCCTCCAGTTT | 23 | 1645 |
| 904735 | N/A | N/A | 5803 | 5818 | CCGATAAACCTTGTCT | 67 | 1646 |
| 904767 | N/A | N/A | 5859 | 5874 | GCAGTTTTGTAAGTGC | 43 | 1647 |
| 904799 | N/A | N/A | 5930 | 5945 | TCGGAGACCTCCCTAA | 25 | 1648 |
| 904831 | N/A | N/A | 5962 | 5977 | TGGGCAAGGCTAAGTT | 49 | 1649 |
| 904863 | N/A | N/A | 6135 | 6150 | ACTCCACACCTTAATT | 36 | 1650 |
| 904895 | N/A | N/A | 6203 | 6218 | TGGTACAAAACTGCAT | 66 | 1651 |
| 904927 | N/A | N/A | 6257 | 6272 | CTCACTAAACCCCACA | 29 | 1652 |
| 904959 | N/A | N/A | 6326 | 6341 | CCAGTGAGATCCAACT | 70 | 1653 |
| 904991 | N/A | N/A | 6376 | 6391 | GATGGGCCCACAGGAT | 2 | 1654 |
| 905023 | N/A | N/A | 6539 | 6554 | GTACTTCTGTTAGATA | 66 | 1655 |
| 905055 | N/A | N/A | 6597 | 6612 | GCTGTAACCCCCTGAA | 85 | 1656 |
| 905087 | N/A | N/A | 6645 | 6660 | GCCCTGAAACATTCCT | 20 | 1657 |
| 905119 | N/A | N/A | 6744 | 6759 | AACCCAGGTTTGGATG | 40 | 1658 |
| 905151 | N/A | N/A | 6876 | 6891 | CGTGGCAACTCTGTAA | 41 | 1659 |
| 905183 | N/A | N/A | 6991 | 7006 | TCGGCTGAGTGCTCTC | 63 | 1660 |
| 905215 | N/A | N/A | 7120 | 7135 | CAGGGTACACGGCTCT | 40 | 1661 |
| 905247 | N/A | N/A | 7241 | 7256 | TGGTCTTGGGCACTCT | 76 | 1662 |
| 905279 | N/A | N/A | 7335 | 7350 | ATAGCTTACCTGTGGG | 38 | 1663 |
| 905311 | N/A | N/A | 7471 | 7486 | TCACCGCCCAAAACCA | 29 | 1664 |
| 905343 | N/A | N/A | 7839 | 7854 | CCGTGCACACACAAGA | 0 | 1665 |
| 905375 | N/A | N/A | 7928 | 7943 | GATCTGGGAATTATGG | 62 | 1666 |
| 905407 | N/A | N/A | 7997 | 8012 | AGAACTCAAGTCAGTA | 92 | 1667 |
| 905439 | N/A | N/A | 8084 | 8099 | GCTCCCTGTAATCACA | 35 | 1668 |
| 905471 | N/A | N/A | 8172 | 8187 | TGTTTAGGCATTCAGA | 86 | 1669 |
| 905503 | N/A | N/A | 8317 | 8332 | TGAAATTATTGGTTCA | 6 | 1670 |
| 905535 | N/A | N/A | 8383 | 8398 | GCCTGTTGGGTCAAAC | 60 | 1671 |
| 905567 | N/A | N/A | 8453 | 8468 | ACCAACATGAAGTGAG | 72 | 1672 |
| 905599 | N/A | N/A | 8623 | 8638 | CCTTTTGGCACCTTCA | 93 | 1673 |
| 905631 | N/A | N/A | 8741 | 8756 | CTATTAGAGGGCTAGT | 78 | 1674 |
| 905663 | N/A | N/A | 8827 | 8842 | TTTAAACTCAGGTGAC | 64 | 1675 |
| 905695 | N/A | N/A | 8886 | 8901 | TATGGAGTCATTAGTG | 81 | 1676 |
| 905727 | N/A | N/A | 8955 | 8970 | ATAACAGCCATTGCAT | 14 | 1677 |

TABLE 25
Inhibition of APOL1 mRNA by 3-10-3 cEt gapmers targeting SEQ ID NO: 1 and 2

| | SEQ | SEQ | SEQ | SEQ | | | |
|---|---|---|---|---|---|---|---|
| | ID: 1 | ID: 1 | ID: 2 | ID: 2 | | % | SEQ |
| Compound | Start | Stop | Start | Stop | | inhi- | ID |
| Number | Site | Site | Site | Site | Sequence | bition | NO |
| 793406 | N/A | N/A | 8306 | 8321 | GTTCAAAAGCAGCATT | 95 | 13 |
| 903501 | 264 | 279 | N/A | N/A | GTTTTGTTGCACCCTC | 98 | 1678 |
| 903543 | 402 | 417 | 9065 | 9080 | ATTCTGTGTGCTCACT | 98 | 1679 |
| 903545 | 405 | 420 | 9068 | 9083 | CAGATTCTGTGTGCTC | 98 | 1680 |
| 903556 | 419 | 434 | 9082 | 9097 | GTCAGCAGGAGTAGCA | 65 | 1681 |
| 903557 | 421 | 436 | 9084 | 9099 | CAGTCAGCAGGAGTAG | 84 | 1682 |
| 903558 | 422 | 437 | 9085 | 9100 | TCAGTCAGCAGGAGTA | 92 | 1683 |
| 903564 | 429 | 444 | 9092 | 9107 | CTCATTATCAGTCAGC | 94 | 1684 |
| 903567 | 434 | 449 | 9097 | 9112 | CAGGCCTCATTATCAG | 40 | 1685 |
| 903568 | 435 | 450 | 9098 | 9113 | CCAGGCCTCATTATCA | 52 | 1686 |
| 903569 | 436 | 451 | 9099 | 9114 | TCCAGGCCTCATTATC | 69 | 1687 |
| 903570 | 437 | 452 | 9100 | 9115 | TTCCAGGCCTCATTAT | 55 | 1688 |
| 903571 | 438 | 453 | 9101 | 9116 | GTTCCAGGCCTCATTA | 74 | 1689 |
| 903572 | 439 | 454 | 9102 | 9117 | CGTTCCAGGCCTCATT | 97 | 1690 |
| 903573 | 440 | 455 | 9103 | 9118 | CCGTTCCAGGCCTCAT | 81 | 1691 |
| 903574 | 441 | 456 | 9104 | 9119 | TCCGTTCCAGGCCTCA | 85 | 1692 |
| 903575 | 443 | 458 | 9106 | 9121 | AATCCGTTCCAGGCCT | 52 | 1693 |
| 903576 | 444 | 459 | 9107 | 9122 | GAATCCGTTCCAGGCC | 55 | 1694 |
| 903577 | 445 | 460 | 9108 | 9123 | CGAATCCGTTCCAGGC | 45 | 1695 |
| 903578 | 446 | 461 | 9109 | 9124 | ACGAATCCGTTCCAGG | 43 | 1696 |
| 903579 | 447 | 462 | 9110 | 9125 | CACGAATCCGTTCCAG | 61 | 1697 |
| 903581 | 449 | 464 | 9112 | 9127 | GCCACGAATCCGTTCC | 35 | 1698 |
| 903582 | 450 | 465 | 9113 | 9128 | AGCCACGAATCCGTTC | 53 | 1699 |
| 903583 | 451 | 466 | 9114 | 9129 | CAGCCACGAATCCGTT | 47 | 1700 |
| 903584 | 452 | 467 | 9115 | 9130 | GCAGCCACGAATCCGT | 40 | 1701 |
| 903585 | 453 | 468 | 9116 | 9131 | AGCAGCCACGAATCCG | 82 | 1702 |
| 903586 | 469 | 484 | N/A | N/A | TCCTGGGCAGTTCAGC | 53 | 1703 |
| 903587 | 471 | 486 | N/A | N/A | ATTCCTGGGCAGTTCA | 89 | 1704 |
| 903589 | 473 | 488 | N/A | N/A | TCATTCCTGGGCAGTT | 74 | 1705 |
| 903592 | 501 | 516 | 12592 | 12607 | GTCCAGAGCTTTACGG | 65 | 1706 |
| 903595 | 504 | 519 | 12595 | 12610 | GTTGTCCAGAGCTTTA | 94 | 1707 |
| 903596 | 505 | 520 | 12596 | 12611 | GGTTGTCCAGAGCTTT | 98 | 1708 |
| 903597 | 506 | 521 | 12597 | 12612 | AGGTTGTCCAGAGCTT | 83 | 1709 |
| 903598 | 507 | 522 | 12598 | 12613 | AAGGTTGTCCAGAGCT | 80 | 1710 |
| 903599 | 508 | 523 | 12599 | 12614 | CAAGGTTGTCCAGAGC | 91 | 1711 |
| 903600 | 509 | 524 | 12600 | 12615 | GCAAGGTTGTCCAGAG | 90 | 1712 |
| 903606 | 515 | 530 | 12606 | 12621 | TGTCTTGCAAGGTTGT | 98 | 1713 |
| 903607 | 516 | 531 | 12607 | 12622 | TTGTCTTGCAAGGTTG | 96 | 1714 |
| 903639 | 616 | 631 | 12707 | 12722 | TGTTATCCTCAAGCTC | 76 | 1715 |
| 903959 | 1334 | 1349 | 13425 | 13440 | GCCTGCAGAATCTTAT | 65 | 1716 |
| 903991 | 1394 | 1409 | 13485 | 13500 | CCCCTGCCAGGCATAT | 71 | 1717 |
| 903997 | 1707 | 1722 | 13798 | 13813 | TGGGTCAAAAGCGATG | 96 | 1718 |
| 904055 | 1867 | 1882 | 13958 | 13973 | TTATTGCAGGCTCCAA | 96 | 1719 |
| 904221 | 2719 | 2734 | 14810 | 14825 | TTACTTACCGGGTAAG | 57 | 1720 |
| 904279 | N/A | N/A | 449 | 464 | CAGCAAACACGCTCCC | 23 | 1721 |
| 904509 | N/A | N/A | 5023 | 5038 | GGCCGTGTCACCCTAA | 46 | 1722 |
| 904637 | N/A | N/A | 5463 | 5478 | GGCCAGGTAGCCGTGT | 46 | 1723 |
| 904951 | N/A | N/A | 6306 | 6321 | GCTGGGTCTGACCCAC | 0 | 1724 |
| 905005 | N/A | N/A | 6415 | 6430 | AAGGAGTTGCTGAAAC | 75 | 1725 |
| 905015 | N/A | N/A | 6438 | 6453 | GCAGGTTCACATGACA | 88 | 1726 |
| 905019 | N/A | N/A | 6534 | 6549 | TCTGTTAGATACAAAC | 92 | 1727 |
| 905037 | N/A | N/A | 6570 | 6585 | TGGGAAACTCAACTGG | 77 | 1728 |
| 905111 | N/A | N/A | 6734 | 6749 | TGGATGGAAGGAACCT | 73 | 1729 |
| 905469 | N/A | N/A | 8164 | 8179 | CATTCAGAATTTCCAC | 98 | 1730 |
| 905837 | N/A | N/A | 11345 | 11360 | CCCACCATTGATGGGT | 30 | 1731 |
| 905869 | N/A | N/A | 12150 | 12165 | TCACTATCGATCAAAT | 53 | 1732 |

TABLE 26
Inhibition of APOL1 mRNA by 3-10-3 cEt gapmers targeting SEQ ID NO: 1 and 2

| | SEQ | SEQ | SEQ | SEQ | | | |
|---|---|---|---|---|---|---|---|
| | ID: 1 | ID: 1 | ID: 2 | ID: 2 | | % | SEQ |
| Compound | Start | Stop | Start | Stop | | inhi- | ID |
| Number | Site | Site | Site | Site | Sequence | bition | NO |
| 905758 | N/A | N/A | 9461 | 9476 | CACTTTACATGCACGA | 90 | 1733 |
| 905867 | N/A | N/A | 12079 | 12094 | TCATCATAGATACTCC | 87 | 1734 |
| 972204 | N/A | N/A | 9219 | 9234 | GGAGGTGTGCCTGTCA | 49 | 1735 |
| 972206 | N/A | N/A | 9311 | 9326 | GCTACTCACTGCCAGC | 0 | 1736 |
| 972208 | N/A | N/A | 9356 | 9371 | AGAAATGACCCTGTTC | 31 | 1737 |
| 972210 | N/A | N/A | 9450 | 9465 | CACGATCTCATTTTTC | 79 | 1738 |
| 972212 | N/A | N/A | 9453 | 9468 | ATGCACGATCTCATTT | 5 | 1739 |
| 972214 | N/A | N/A | 9455 | 9470 | ACATGCACGATCTCAT | 48 | 1740 |
| 972216 | N/A | N/A | 9458 | 9473 | TTTACATGCACGATCT | 66 | 1741 |
| 972218 | N/A | N/A | 9460 | 9475 | ACTTTACATGCACGAT | 89 | 1742 |
| 972220 | N/A | N/A | 9481 | 9496 | GTGTCAGTCATTATGC | 79 | 1743 |
| 972222 | N/A | N/A | 9501 | 9516 | GTTAACTGTGCACCTA | 25 | 1744 |
| 972224 | N/A | N/A | 9519 | 9534 | AGCTTGTAAGATGTTA | 44 | 1745 |
| 972226 | N/A | N/A | 9551 | 9566 | GAAGATCCTTAACCCT | 46 | 1746 |
| 972228 | N/A | N/A | 9622 | 9637 | ACATTGGTTAGGTCAG | 82 | 1747 |
| 972230 | N/A | N/A | 9624 | 9639 | ACACATTGGTTAGGTC | 55 | 1748 |
| 972232 | N/A | N/A | 9672 | 9687 | GGAATTCCTCAGATGA | 15 | 1749 |
| 972234 | N/A | N/A | 9678 | 9693 | GTTTATGGAATTCCTC | 95 | 1750 |
| 972236 | N/A | N/A | 9689 | 9704 | GGTCCTGCCGTGTTTA | 29 | 1751 |
| 972238 | N/A | N/A | 9846 | 9861 | TCCTATCACATTGAGT | 37 | 1752 |
| 972240 | N/A | N/A | 9869 | 9884 | TGCCTCTAAGGCCTTC | 10 | 1753 |
| 972242 | N/A | N/A | 9904 | 9919 | ATCTTGGTGTTGGTTC | 68 | 1754 |
| 972244 | N/A | N/A | 10059 | 10074 | TTAAGTTTCAAGCCCT | 77 | 1755 |
| 972246 | N/A | N/A | 10072 | 10087 | GTTCATGACCTCCTTA | 76 | 1756 |
| 972248 | N/A | N/A | 10083 | 10098 | GTCCTCTGCAAGTTCA | 65 | 1757 |
| 972250 | N/A | N/A | 10125 | 10140 | GATCATCCAGACAGGG | 27 | 1758 |
| 972252 | N/A | N/A | 10196 | 10211 | GAACTTGCCAGTTCCA | 32 | 1759 |
| 972254 | N/A | N/A | 10257 | 10272 | TGCTTGTCAATGTCAG | 72 | 1760 |
| 972256 | N/A | N/A | 10265 | 10280 | AGACATACTGCTTGTC | 0 | 1761 |
| 972258 | N/A | N/A | 10285 | 10300 | TACTATGAAAATGGTC | 11 | 1762 |
| 972260 | N/A | N/A | 10297 | 10312 | AGCAACTAATTCTACT | 47 | 1763 |
| 972262 | N/A | N/A | 10307 | 10322 | ACAAATTGGCAGCAAC | 81 | 1764 |
| 972264 | N/A | N/A | 10309 | 10324 | ACACAAATTGGCAGCA | 72 | 1765 |
| 972266 | N/A | N/A | 10420 | 10435 | CACCTATATAAATTGC | 39 | 1766 |
| 972268 | N/A | N/A | 10464 | 10479 | GCAATTTTATGGAACC | 94 | 1767 |
| 972270 | N/A | N/A | 10507 | 10522 | CTTAGTAGTGACAGCT | 40 | 1768 |
| 972272 | N/A | N/A | 10521 | 10536 | AGCCTAACTGATGCCT | 14 | 1769 |
| 972274 | N/A | N/A | 10543 | 10558 | GGTCTCACTCGCAGGT | 52 | 1770 |
| 972276 | N/A | N/A | 10623 | 10638 | GGCTATTCATTCTGGC | 0 | 1771 |
| 972278 | N/A | N/A | 10631 | 10646 | GGAGATCTGGCTATTC | 71 | 1772 |
| 972280 | N/A | N/A | 10669 | 10684 | GCTACTGGTTCTGGCC | 0 | 1773 |
| 972282 | N/A | N/A | 10774 | 10789 | GAGTACTTTGAATTCA | 0 | 1774 |
| 972284 | N/A | N/A | 10788 | 10803 | GTCTGGCTATCTCTGA | 49 | 1775 |
| 972286 | N/A | N/A | 10798 | 10813 | AGACATTGCAGTCTGG | 22 | 1776 |
| 972288 | N/A | N/A | 10835 | 10850 | TAAATTTGCAGGTGGT | 96 | 1777 |
| 972290 | N/A | N/A | 10837 | 10852 | CTTAAATTTGCAGGTG | 89 | 1778 |
| 972292 | N/A | N/A | 10852 | 10867 | GGATTTAGAAATCCCC | 7 | 1779 |
| 972294 | N/A | N/A | 10944 | 10959 | TGTGTTCTTTCCGTGT | 48 | 1780 |
| 972296 | N/A | N/A | 11017 | 11032 | GACAATGAAGCTTCAC | 60 | 1781 |
| 972298 | N/A | N/A | 11097 | 11112 | TTAACTGGGTGAGCTT | 27 | 1782 |
| 972300 | N/A | N/A | 11122 | 11137 | TAATGTGATTCACAGG | 98 | 1783 |
| 972302 | N/A | N/A | 11126 | 11141 | GGTTTAATGTGATTCA | 90 | 1784 |
| 972304 | N/A | N/A | 11148 | 11163 | CCTGAAAAAAGGCTTC | 55 | 1785 |
| 972306 | N/A | N/A | 11160 | 11175 | TGTAACAACAATCCTG | 61 | 1786 |
| 972308 | N/A | N/A | 11196 | 11211 | TTACTATATTTGGAGC | 33 | 1787 |
| 972310 | N/A | N/A | 11264 | 11279 | TGTCTCCTATCAGTCC | 36 | 1788 |
| 972312 | N/A | N/A | 11291 | 11306 | CAATTTAGCAGGAACC | 36 | 1789 |
| 972314 | N/A | N/A | 11361 | 11376 | GATTATGCTCTTCACC | 59 | 1790 |
| 972316 | N/A | N/A | 11366 | 11381 | TATCTGATTATGCTCT | 78 | 1791 |
| 972318 | N/A | N/A | 11380 | 11395 | TGATTACGCTTTGCTA | 15 | 1792 |
| 972320 | N/A | N/A | 11382 | 11397 | TCTGATTACGCTTTGC | 79 | 1793 |
| 972322 | N/A | N/A | 11582 | 11597 | AGATACTCTGGACACT | 50 | 1794 |
| 972324 | N/A | N/A | 11606 | 11621 | GGCAGCTTGTGATCCA | 0 | 1795 |
| 972326 | N/A | N/A | 11731 | 11746 | CCGTATAGGAATCTGA | 37 | 1796 |
| 972328 | N/A | N/A | 11749 | 11764 | GGTGATTTGGCCACGG | 56 | 1797 |
| 972330 | N/A | N/A | 11804 | 11819 | AGTGATCTCCAGGCCC | 25 | 1798 |
| 972332 | N/A | N/A | 11956 | 11971 | GTGACTGCCAAAGTGT | 22 | 1799 |
| 972334 | N/A | N/A | 11996 | 12011 | TTGATAAAGATGCCTC | 76 | 1800 |
| 972336 | N/A | N/A | 12011 | 12026 | TTTCATGGTAGGTGTT | 76 | 1801 |
| 972338 | N/A | N/A | 12070 | 12085 | ATACTCCTCAATATTT | 41 | 1802 |
| 972340 | N/A | N/A | 12073 | 12088 | TAGATACTCCTCAATA | 56 | 1803 |
| 972342 | N/A | N/A | 12078 | 12093 | CATCATAGATACTCCT | 88 | 1804 |
| 972344 | N/A | N/A | 12081 | 12096 | GTTCATCATAGATACT | 26 | 1805 |
| 972346 | N/A | N/A | 12180 | 12195 | GATCTCTATCCTGTGT | 36 | 1806 |
| 972348 | N/A | N/A | 14951 | 14966 | GACTCGAACAAGTCCA | 1 | 1807 |
| 972350 | N/A | N/A | 15111 | 15126 | CTTCATCGGTCCATCG | 30 | 1808 |
| 972352 | N/A | N/A | 15298 | 15313 | TCCAGGTACCCTTCTA | 2 | 1809 |
| 972354 | N/A | N/A | 15311 | 15326 | AGACATCACCTTGTCC | 1 | 1810 |

TABLE 27
Inhibition of APOL1 mRNA by 3-10-3 cEt gapmers targeting SEQ ID NO: 1 and 2

| | SEQ | SEQ | SEQ | SEQ | | | |
|---|---|---|---|---|---|---|---|
| | ID: 1 | ID: 1 | ID: 2 | ID: 2 | | % | SEQ |
| Compound | Start | Stop | Start | Stop | | inhi- | ID |
| Number | Site | Site | Site | Site | Sequence | bition | NO |
| 905758 | N/A | N/A | 9461 | 9476 | CACTTTACATGCACGA | 88 | 1733 |
| 905867 | N/A | N/A | 12079 | 12094 | TCATCATAGATACTCC | 85 | 1734 |
| 972205 | N/A | N/A | 9277 | 9292 | ATTCTTCCTGGAGTGC | 50 | 1811 |
| 972207 | N/A | N/A | 9315 | 9330 | TGAGGCTACTCACTGC | 0 | 1812 |
| 972209 | N/A | N/A | 9390 | 9405 | GTAACTGGCAAAGTTC | 3 | 1813 |
| 972211 | N/A | N/A | 9452 | 9467 | TGCACGATCTCATTTT | 29 | 1814 |
| 972213 | N/A | N/A | 9454 | 9469 | CATGCACGATCTCATT | 23 | 1815 |
| 972215 | N/A | N/A | 9456 | 9471 | TACATGCACGATCTCA | 83 | 1816 |
| 972217 | N/A | N/A | 9459 | 9474 | CTTTACATGCACGATC | 55 | 1817 |
| 972219 | N/A | N/A | 9462 | 9477 | GCACTTTACATGCACG | 63 | 1818 |
| 972221 | N/A | N/A | 9483 | 9498 | GTGTGTCAGTCATTAT | 94 | 1819 |
| 972223 | N/A | N/A | 9502 | 9517 | CGTTAACTGTGCACCT | 50 | 1820 |
| 972225 | N/A | N/A | 9546 | 9561 | TCCTTAACCCTGGTTC | 21 | 1821 |
| 972227 | N/A | N/A | 9558 | 9573 | TCAAGAAGAAGATCCT | 48 | 1822 |
| 972229 | N/A | N/A | 9623 | 9638 | CACATTGGTTAGGTCA | 82 | 1823 |
| 972231 | N/A | N/A | 9626 | 9641 | ACACACATTGGTTAGG | 75 | 1824 |
| 972233 | N/A | N/A | 9675 | 9690 | TATGGAATTCCTCAGA | 40 | 1825 |
| 972235 | N/A | N/A | 9681 | 9696 | CGTGTTTATGGAATTC | 71 | 1826 |
| 972237 | N/A | N/A | 9841 | 9856 | TCACATTGAGTTGCTA | 85 | 1827 |
| 972239 | N/A | N/A | 9868 | 9883 | GCCTCTAAGGCCTTCA | 7 | 1828 |
| 972241 | N/A | N/A | 9899 | 9914 | GGTGTTGGTTCCCCAC | 31 | 1829 |
| 972243 | N/A | N/A | 9937 | 9952 | GCTGATCCCGGTCTCT | 42 | 1830 |
| 972245 | N/A | N/A | 10062 | 10077 | TCCTTAAGTTTCAAGC | 31 | 1831 |
| 972247 | N/A | N/A | 10077 | 10092 | TGCAAGTTCATGACCT | 41 | 1832 |
| 972249 | N/A | N/A | 10107 | 10122 | GAAATATCCCTCTCCC | 23 | 1833 |
| 972251 | N/A | N/A | 10148 | 10163 | CCCTATATGCCCATGA | 75 | 1834 |
| 972253 | N/A | N/A | 10197 | 10212 | AGAACTTGCCAGTTCC | 0 | 1835 |
| 972255 | N/A | N/A | 10264 | 10279 | GACATACTGCTTGTCA | 0 | 1836 |
| 972257 | N/A | N/A | 10272 | 10287 | GTCACTAAGACATACT | 8 | 1837 |
| 972259 | N/A | N/A | 10296 | 10311 | GCAACTAATTCTACTA | 80 | 1838 |
| 972261 | N/A | N/A | 10306 | 10321 | CAAATTGGCAGCAACT | 61 | 1839 |
| 972263 | N/A | N/A | 10308 | 10323 | CACAAATTGGCAGCAA | 91 | 1840 |
| 972265 | N/A | N/A | 10419 | 10434 | ACCTATATAAATTGCT | 22 | 1841 |
| 972267 | N/A | N/A | 10461 | 10476 | ATTTTATGGAACCTCT | 72 | 1842 |
| 972269 | N/A | N/A | 10495 | 10510 | AGCTTCACCTGTGTGC | 10 | 1843 |
| 972271 | N/A | N/A | 10510 | 10525 | TGCCTTAGTAGTGACA | 34 | 1844 |
| 972273 | N/A | N/A | 10539 | 10554 | TCACTCGCAGGTGTCA | 30 | 1845 |
| 972275 | N/A | N/A | 10622 | 10637 | GCTATTCATTCTGGCT | 0 | 1846 |
| 972277 | N/A | N/A | 10624 | 10639 | TGGCTATTCATTCTGG | 22 | 1847 |
| 972279 | N/A | N/A | 10664 | 10679 | TGGTTCTGGCCACTGC | 37 | 1848 |
| 972281 | N/A | N/A | 10732 | 10747 | GGAGTTCACTTTGCCT | 0 | 1849 |
| 972283 | N/A | N/A | 10783 | 10798 | GCTATCTCTGAGTACT | 13 | 1850 |
| 972285 | N/A | N/A | 10797 | 10812 | GACATTGCAGTCTGGC | 46 | 1851 |
| 972287 | N/A | N/A | 10800 | 10815 | TCAGACATTGCAGTCT | 0 | 1852 |
| 972289 | N/A | N/A | 10836 | 10851 | TTAAATTTGCAGGTGG | 92 | 1853 |
| 972291 | N/A | N/A | 10839 | 10854 | CCCTTAAATTTGCAGG | 19 | 1854 |
| 972293 | N/A | N/A | 10853 | 10868 | TGGATTTAGAAATCCC | 13 | 1855 |
| 972295 | N/A | N/A | 11012 | 11027 | TGAAGCTTCACACTTA | 29 | 1856 |
| 972297 | N/A | N/A | 11019 | 11034 | AGGACAATGAAGCTTC | 50 | 1857 |
| 972299 | N/A | N/A | 11100 | 11115 | TCCTTAACTGGGTGAG | 25 | 1858 |
| 972301 | N/A | N/A | 11125 | 11140 | GTTTAATGTGATTCAC | 88 | 1859 |
| 972303 | N/A | N/A | 11127 | 11142 | TGGTTTAATGTGATTC | 90 | 1860 |
| 972305 | N/A | N/A | 11159 | 11174 | GTAACAACAATCCTGA | 69 | 1861 |
| 972307 | N/A | N/A | 11195 | 11210 | TACTATATTTGGAGCT | 40 | 1862 |
| 972309 | N/A | N/A | 11200 | 11215 | GTCTTTACTATATTTG | 77 | 1863 |
| 972311 | N/A | N/A | 11290 | 11305 | AATTTAGCAGGAACCC | 53 | 1864 |
| 972313 | N/A | N/A | 11307 | 11322 | GAGAATCCTGTTAGGC | 51 | 1865 |
| 972315 | N/A | N/A | 11362 | 11377 | TGATTATGCTCTTCAC | 36 | 1866 |
| 972317 | N/A | N/A | 11368 | 11383 | GCTATCTGATTATGCT | 18 | 1867 |
| 972319 | N/A | N/A | 11381 | 11396 | CTGATTACGCTTTGCT | 33 | 1868 |
| 972321 | N/A | N/A | 11572 | 11587 | GACACTAAGGCATGGG | 77 | 1869 |
| 972323 | N/A | N/A | 11584 | 11599 | GCAGATACTCTGGACA | 46 | 1870 |
| 972325 | N/A | N/A | 11699 | 11714 | GGGCTATTTGGTGTCT | 22 | 1871 |
| 972327 | N/A | N/A | 11747 | 11762 | TGATTTGGCCACGGGA | 58 | 1872 |
| 972329 | N/A | N/A | 11767 | 11782 | GAACATCTGTCTTTGC | 42 | 1873 |
| 972331 | N/A | N/A | 11856 | 11871 | AGCATGAACTTTACCC | 53 | 1874 |
| 972333 | N/A | N/A | 11968 | 11983 | CAGGTCAACACCGTGA | 0 | 1875 |
| 972335 | N/A | N/A | 11998 | 12013 | GTTTGATAAAGATGCC | 77 | 1876 |
| 972337 | N/A | N/A | 12069 | 12084 | TACTCCTCAATATTTA | 66 | 1877 |
| 972339 | N/A | N/A | 12071 | 12086 | GATACTCCTCAATATT | 37 | 1878 |
| 972341 | N/A | N/A | 12077 | 12092 | ATCATAGATACTCCTC | 93 | 1879 |
| 972343 | N/A | N/A | 12080 | 12095 | TTCATCATAGATACTC | 87 | 1880 |
| 972345 | N/A | N/A | 12168 | 12183 | GTGTAAATTGCAGAGC | 82 | 1881 |
| 972347 | N/A | N/A | 12199 | 12214 | TGTGAAATGAGCTCCA | 78 | 1882 |
| 972349 | N/A | N/A | 14953 | 14968 | ATGACTCGAACAAGTC | 38 | 1883 |
| 972351 | N/A | N/A | 15116 | 15131 | TGGAACTTCATCGGTC | 5 | 1884 |
| 972353 | N/A | N/A | 15310 | 15325 | GACATCACCTTGTCCA | 16 | 1885 |
| 972355 | N/A | N/A | 15432 | 15447 | GGAAGTCAGGCACCCA | 16 | 1886 |

TABLE 28
Gapmers targeting SEQ ID NO: 1 and 2

| | SEQ | SEQ | SEQ | SEQ | | | |
|---|---|---|---|---|---|---|---|
| | ID: 1 | ID: 1 | ID: 2 | ID: 2 | | | SEQ |
| Compound | Start | Stop | Start | Stop | | | ID |
| Number | Site | Site | Site | Site | Sequence | Chemistry | NO |
| 904628 | N/A | N/A | 5450 | 5465 | TGTTATATTTGATCCT | kkk-d10-kkk | 1887 |
| 905141 | N/A | N/A | 6820 | 6835 | GAACGCAATGCTGACT | kkk-d10-kkk | 1888 |
| 905269 | N/A | N/A | 7283 | 7298 | CAGCATTGAGTACAAC | kkk-d10-kkk | 1889 |
| 905521 | N/A | N/A | 8366 | 8381 | CTTTATACCAGTGTCT | kkk-d10-kkk | 1890 |
| 905582 | N/A | N/A | 8520 | 8535 | GAGAACATTGAAACAC | kkk-d10-kkk | 1891 |
| 905684 | N/A | N/A | 8875 | 8890 | TAGTGCTATAGAGGGA | kkk-d10-kkk | 1892 |
| 905757 | N/A | N/A | 9457 | 9472 | TTACATGCACGATCTC | kkk-d10-kkk | 1893 |
| 969419 | N/A | N/A | 9460 | 9475 | ACTTTACATGCACGAT | kk-d9-ekeke | 1742 |
| 905758 | N/A | N/A | 9461 | 9476 | CACTTTACATGCACGA | kkk-d10-kkk | 1733 |
| 969219 | N/A | N/A | 9461 | 9476 | CACTTTACATGCACGA | kk-d10-keke | 1733 |
| 971984 | N/A | N/A | 9461 | 9476 | CACTTTACATGCACGA | kk-d9-kekek | 1733 |
| 905808 | N/A | N/A | 10462 | 10477 | AATTTTATGGAACCTC | kkk-d10-kkk | 1894 |
| 971987 | N/A | N/A | 12076 | 12091 | TCATAGATACTCCTCA | kkk-d10-kkk | 1895 |
| 905867 | N/A | N/A | 12079 | 12094 | TCATCATAGATACTCC | kkk-d10-kkk | 1734 |
| 904016 | 1772 | 1787 | 13863 | 13878 | CCCTAACACTCAGTTC | kkk-d10-kkk | 1896 |
| 904084 | 2253 | 2268 | 14344 | 14359 | TCCGTCAATATATTCT | kkk-d10-kkk | 1897 |
| 904212 | 2709 | 2724 | 14800 | 14815 | GGTAAGAGCGATGGGA | kkk-d10-kkk | 1898 |

### Deoxy, MOE, and cEt Gapmers

[0335] The newly designed chimeric antisense oligonucleotides in the Tables below were designed as deoxy, MOE, and cEt gapmers. The deoxy, MOE and cEt oligonucleotides have nucleosides that have either a MOE sugar modification, an (S)-cEt sugar modification, or a deoxy modification. The ‘Chemistry’ column describes the sugar modifications of each oligonucleotide. ‘k’ indicates an (S)-cEt sugar modification; ‘d’ indicates deoxyribose; and ‘e’ indicates a MOE modification. The internucleoside linkages throughout each gapmer are phosphorothioate (P═S) linkages. All cytosine residues throughout each gapmer are 5-methylcytosines. The sugar motifs of the gapmers are shown in the Chemistry columns of the tables below wherein ‘k’ means cEt sugar; ‘e’ means 2′-MOE sugar; ‘d’ means deoxy sugar, and the number after ‘d’ indicates the number of deoxy nucleosides.

[0336] “Start site” indicates the 5′-most nucleoside to which the gapmer is targeted in the human gene sequence. “Stop site” indicates the 3′-most nucleoside to which the gapmer is targeted human gene sequence. Each gapmer listed in the Tables below is targeted to either the human APOL1 mRNA, designated herein as SEQ ID NO: 1 (GENBANK Accession No. NM_003661.3) or the human APOL1 genomic sequence, designated herein as SEQ ID NO: 2 (GENBANK Accession No. NT_011520.9 truncated from nucleotides 15986452 to 16001905). ‘n/a’ indicates that the antisense oligonucleotide does not target that a particular gene sequence with 100% complementarity.

[0337] The antisense oligonucleotides were tested in a series of experiments that had similar culture conditions. The results for each experiment are presented in separate tables shown below. Cultured A431 cells at a density of 5,000 cells per well were transfected by free uptake with 2,000 nM antisense oligonucleotide. After a treatment period of approximately 24 hours, RNA was isolated from the cells and APOL1 mRNA levels were measured by quantitative real-time PCR. Human primer probe set RTS35962 was used to measure mRNA levels. APOL1 mRNA levels were adjusted according to total RNA content, as measured by RIBOGREEN®. Results are presented as percent inhibition of APOL1, relative to untreated control cells.

TABLE 29
Inhibition of APOL1 mRNA by deoxy, MOE, and cEt gapmers targeting SEQ ID NO: 1 and 2

| | SEQ | SEQ | SEQ | SEQ | | | | |
|---|---|---|---|---|---|---|---|---|
| | ID: 1 | ID: 1 | ID: 2 | ID: 2 | | | | SEQ |
| Compound | Start | Stop | Start | Stop | | | % | ID |
| Number | Site | Site | Site | Site | Sequence | Chemistry | inhibition | NO |
| 793406 | N/A | N/A | 8306 | 8321 | GTTCAAAAGCAGCATT | kkk-d10-kkk | 90 | 13 |
| 905095 | N/A | N/A | 6702 | 6717 | GTATTTCTTGATGTGG | kkk-d10-kkk | 99 | 413 |
| 905491 | N/A | N/A | 8237 | 8252 | GAGTATTGTTTTTGTG | kkk-d10-kkk | 93 | 1899 |
| 905634 | N/A | N/A | 8744 | 8759 | ATTCTATTAGAGGGCT | kkk-d10-kkk | 95 | 1326 |
| 969064 | N/A | N/A | 6700 | 6715 | ATTTCTTGATGTGGTG | k-d10-kekek | 96 | 343 |
| 969084 | N/A | N/A | 5449 | 5464 | GTTATATTTGATCCTC | k-d10-kekek | 95 | 1900 |
| 969094 | N/A | N/A | 8321 | 8336 | GTTATGAAATTATTGG | k-d10-kekek | 73 | 76 |
| 969104 | 1031 | 1046 | 13122 | 13137 | AGATTGGCTCTGGCTC | k-d9-kekeke | 23 | 654 |
| 969114 | N/A | N/A | 8162 | 8177 | TTCAGAATTTCCACTA | k-d9-kekeke | 62 | 1186 |
| 969124 | N/A | N/A | 8306 | 8321 | GTTCAAAAGCAGCATT | k-d9-kekeke | 33 | 13 |
| 969134 | N/A | N/A | 5858 | 5873 | CAGTTTTGTAAGTGCA | k-d9-kekeke | 48 | 1577 |
| 969144 | N/A | N/A | 8743 | 8758 | TTCTATTAGAGGGCTA | k-d9-kekeke | 34 | 80 |
| 969154 | 2340 | 2355 | 14431 | 14446 | GTTCTAACTCTTGGGC | kek-d9-eekk | 86 | 243 |
| 969164 | N/A | N/A | 7922 | 7937 | GGAATTATGGAATTGC | kek-d9-eekk | 98 | 1249 |
| 969184 | N/A | N/A | 6547 | 6562 | TCAGATGGGTACTTCT | kk-d10-keke | 89 | 411 |
| 969194 | N/A | N/A | 8743 | 8758 | TTCTATTAGAGGGCTA | kk-d10-keke | 94 | 80 |
| 969204 | 2736 | 2751 | 14827 | 14842 | GCTAATTTTCTGACTG | kk-d10-keke | 99 | 1283 |
| 969214 | N/A | N/A | 8237 | 8252 | GAGTATTGTTTTTGTG | kk-d10-keke | 96 | 1899 |
| 969224 | 2735 | 2750 | 14826 | 14841 | CTAATTTTCTGACTGT | kk-d8-eeeekk | 88 | 1901 |
| 969234 | N/A | N/A | 8163 | 8178 | ATTCAGAATTTCCACT | kk-d8-eeeekk | 64 | 1902 |
| 969244 | N/A | N/A | 8828 | 8843 | CTTTAAACTCAGGTGA | kk-d8-kekekk | 70 | 151 |
| 969254 | N/A | N/A | 6816 | 6831 | GCAATGCTGACTTGGC | kk-d8-kekekk | 91 | 1903 |
| 969274 | N/A | N/A | 6701 | 6716 | TATTTCTTGATGTGGT | kk-d8-kekekk | 71 | 1904 |
| 969294 | N/A | N/A | 5854 | 5869 | TTTGTAAGTGCAACCA | kk-d8-kekekk | 87 | 1095 |
| 969304 | N/A | N/A | 8366 | 8381 | CTTTATACCAGTGTCT | kk-d8-kekekk | 87 | 1890 |
| 969314 | N/A | N/A | 5449 | 5464 | GTTATATTTGATCCTC | kk-d9-eeekk | 93 | 1900 |
| 969324 | N/A | N/A | 8332 | 8347 | CACATCATTGGGTTAT | kk-d9-eeekk | 86 | 356 |
| 969334 | 1033 | 1048 | 13124 | 13139 | GAAGATTGGCTCTGGC | kk-d9-eeekk | 81 | 1480 |
| 969344 | N/A | N/A | 6818 | 6833 | ACGCAATGCTGACTTG | kk-d9-eeekk | 87 | 1905 |
| 969354 | N/A | N/A | 8831 | 8846 | AAGCTTTAAACTCAGG | kk-d9-eeekk | 95 | 1327 |
| 969364 | N/A | N/A | 6549 | 6564 | TATCAGATGGGTACTT | kk-d9-eeekk | 70 | 550 |
| 969384 | N/A | N/A | 5452 | 5467 | CGTGTTATATTTGATC | kk-d9-eeekk | 74 | 1906 |
| 969394 | N/A | N/A | 8335 | 8350 | CAACACATCATTGGGT | kk-d9-eeekk | 80 | 1907 |
| 969404 | N/A | N/A | 5449 | 5464 | GTTATATTTGATCCTC | kk-d9-ekeke | 96 | 1900 |
| 969414 | N/A | N/A | 8332 | 8347 | CACATCATTGGGTTAT | kk-d9-ekeke | 81 | 356 |
| 969424 | 1033 | 1048 | 13124 | 13139 | GAAGATTGGCTCTGGC | kk-d9-ekeke | 64 | 1480 |
| 969434 | N/A | N/A | 6818 | 6833 | ACGCAATGCTGACTTG | kk-d9-ekeke | 92 | 1919 |
| 969444 | N/A | N/A | 8832 | 8847 | GAAGCTTTAAACTCAG | kk-d9-ekeke | 62 | 1397 |
| 969454 | N/A | N/A | 5856 | 5871 | GTTTTGTAAGTGCAAC | kk-d9-ekeke | 86 | 1230 |
| 969464 | N/A | N/A | 8368 | 8383 | CACTTTATACCAGTGT | kk-d9-ekeke | 0 | 1908 |
| 969474 | N/A | N/A | 5448 | 5463 | TTATATTTGATCCTCA | kk-d9-kdkdk | 96 | 1909 |
| 969484 | N/A | N/A | 8320 | 8335 | TTATGAAATTATTGGT | kk-d9-kdkdk | 47 | 1910 |
| 969494 | 970 | 985 | 13061 | 13076 | AAGTATTGCCAGCTAA | kk-d9-kdkdk | 70 | 1911 |
| 969504 | N/A | N/A | 6702 | 6717 | GTATTTCTTGATGTGG | kk-d9-kdkdk | 87 | 413 |
| 971924 | N/A | N/A | 6547 | 6562 | TCAGATGGGTACTTCT | kk-d9-kekek | 82 | 411 |
| 971934 | N/A | N/A | 8743 | 8758 | TTCTATTAGAGGGCTA | kk-d9-kekek | 53 | 80 |
| 971944 | 2738 | 2753 | 14829 | 14844 | ATGCTAATTTTCTGAC | kk-d9-kekek | 97 | 1912 |
| 971954 | N/A | N/A | 8166 | 8181 | GGCATTCAGAATTTCC | kk-d9-kekek | 46 | 1913 |
| 971964 | N/A | N/A | 8306 | 8321 | GTTCAAAAGCAGCATT | kk-d9-kekek | 60 | 13 |
| 971974 | N/A | N/A | 6548 | 6563 | ATCAGATGGGTACTTC | kk-d9-kekek | 66 | 481 |
| 971994 | 1033 | 1048 | 13124 | 13139 | GAAGATTGGCTCTGGC | kkk-d8-kdkdk | 51 | 1480 |
| 972004 | N/A | N/A | 6702 | 6717 | GTATTTCTTGATGTGG | kkk-d8-kdkdk | 92 | 413 |
| 972014 | N/A | N/A | 8829 | 8844 | GCTTTAAACTCAGGTG | kkk-d8-kdkdk | 93 | 81 |
| 972024 | N/A | N/A | 5853 | 5868 | TTGTAAGTGCAACCAA | kkk-d8-kekek | 35 | 1025 |
| 972034 | N/A | N/A | 8365 | 8380 | TTTATACCAGTGTCTT | kkk-d8-kekek | 76 | 1914 |
| 972044 | 2253 | 2268 | 14344 | 14359 | TCCGTCAATATATTCT | kkk-d8-kekek | 95 | 1897 |
| 972054 | N/A | N/A | 6820 | 6835 | GAACGCAATGCTGACT | kkk-d8-kekek | 48 | 1888 |
| 972074 | N/A | N/A | 5854 | 5869 | TTTGTAAGTGCAACCA | kkk-d8-kekek | 63 | 1095 |
| 972084 | N/A | N/A | 8366 | 8381 | CTTTATACCAGTGTCT | kkk-d8-kekek | 76 | 1890 |
| 972094 | N/A | N/A | 5413 | 5428 | TATTCTCATGGTACAG | kkk-d9-keke | 68 | 1915 |
| 972104 | N/A | N/A | 8238 | 8253 | TGAGTATTGTTTTTGT | kkk-d9-keke | 92 | 1916 |
| 972114 | 970 | 985 | 13061 | 13076 | AAGTATTGCCAGCTAA | kkk-d9-keke | 63 | 1911 |
| 972124 | N/A | N/A | 6702 | 6717 | GTATTTCTTGATGTGG | kkk-d9-keke | 98 | 413 |
| 972144 | N/A | N/A | 5857 | 5872 | AGTTTTGTAAGTGCAA | kkk-d9-kkke | 96 | 1917 |
| 972154 | N/A | N/A | 8742 | 8757 | TCTATTAGAGGGCTAG | kkk-d9-kkke | 51 | 150 |
| 972164 | 2340 | 2355 | 14431 | 14446 | GTTCTAACTCTTGGGC | kkk-d9-kkke | 58 | 243 |
| 972174 | N/A | N/A | 8164 | 8179 | CATTCAGAATTTCCAC | kkk-d9-kkke | 92 | 1730 |
| 972184 | 971 | 986 | 13062 | 13077 | TAAGTATTGCCAGCTA | kkk-d9-kkke | 65 | 1918 |
| 972194 | N/A | N/A | 6819 | 6834 | AACGCAATGCTGACTT | kkk-d9-kkke | 91 | 1919 |

TABLE 30
Inhibition of APOL1 mRNA by deoxy, MOE, and cEt gapmers targeting SEQ ID NO: 1 and 2

| | SEQ | SEQ | SEQ | SEQ | | | | |
|---|---|---|---|---|---|---|---|---|
| | ID: 1 | ID: 1 | ID: 2 | ID: 2 | | | | SEQ |
| Compound | Start | Stop | Start | Stop | | | % | ID |
| Number | Site | Site | Site | Site | Sequence | Chemistry | inhibition | NO |
| 793444 | N/A | N/A | 8830 | 8845 | AGCTTTAAACTCAGGT | kkk-d10-kkk | 68 | 1920 |
| 905095 | N/A | N/A | 6702 | 6717 | GTATTTCTTGATGTGG | kkk-d10-kkk | 99 | 413 |
| 905491 | N/A | N/A | 8237 | 8252 | GAGTATTGTTTTTGTG | kkk-d10-kkk | 94 | 1899 |
| 969055 | N/A | N/A | 8828 | 8843 | CTTTAAACTCAGGTGA | k-d10-kekek | 77 | 151 |
| 969065 | N/A | N/A | 6816 | 6831 | GCAATGCTGACTTGGC | k-d10-kekek | 85 | 1903 |
| 969085 | N/A | N/A | 5450 | 5465 | TGTTATATTTGATCCT | k-d10-kekek | 79 | 1887 |
| 969095 | N/A | N/A | 8333 | 8348 | ACACATCATTGGGTTA | k-d10-kekek | 47 | 426 |
| 969105 | N/A | N/A | 5410 | 5425 | TCTCATGGTACAGGAG | k-d9-kekeke | 55 | 537 |
| 969115 | N/A | N/A | 8235 | 8250 | GTATTGTTTTTGTGGG | k-d9-kekeke | 70 | 1921 |
| 969125 | 970 | 985 | 13061 | 13076 | AAGTATTGCCAGCTAA | k-d9-kekeke | 25 | 1911 |
| 969135 | N/A | N/A | 6548 | 6563 | ATCAGATGGGTACTTC | k-d9-kekeke | 43 | 481 |
| 969145 | N/A | N/A | 8744 | 8759 | ATTCTATTAGAGGGCT | k-d9-kekeke | 34 | 1326 |
| 969155 | 2736 | 2751 | 14827 | 14842 | GCTAATTTTCTGACTG | kek-d9-eekk | 94 | 1283 |
| 969165 | N/A | N/A | 8164 | 8179 | CATTCAGAATTTCCAC | kek-d9-eekk | 89 | 1730 |
| 969175 | N/A | N/A | 8829 | 8844 | GCTTTAAACTCAGGTG | kk-d10-keke | 91 | 81 |
| 969185 | N/A | N/A | 6701 | 6716 | TATTTCTTGATGTGGT | kk-d10-keke | 99 | 1904 |
| 969195 | N/A | N/A | 8828 | 8843 | CTTTAAACTCAGGTGA | kk-d10-keke | 87 | 151 |
| 969205 | N/A | N/A | 5412 | 5427 | ATTCTCATGGTACAGG | kk-d10-keke | 95 | 677 |
| 969215 | N/A | N/A | 8321 | 8336 | GTTATGAAATTATTGG | kk-d10-keke | 68 | 76 |
| 969225 | N/A | N/A | 5411 | 5426 | TTCTCATGGTACAGGA | kk-d8-eeeekk | 80 | 607 |
| 969235 | N/A | N/A | 8236 | 8251 | AGTATTGTTTTTGTGG | kk-d8-eeeekk | 85 | 1922 |
| 969245 | 968 | 983 | 13059 | 13074 | GTATTGCCAGCTAAGG | kk-d8-kekekk | 74 | 1410 |
| 969255 | N/A | N/A | 7920 | 7935 | AATTATGGAATTGCAG | kk-d8-kekekk | 35 | 1923 |
| 969265 | N/A | N/A | 8829 | 8844 | GCTTTAAACTCAGGTG | kk-d8-kekekk | 50 | 81 |
| 969275 | N/A | N/A | 6817 | 6832 | CGCAATGCTGACTTGG | kk-d8-kekekk | 60 | 1924 |
| 969285 | N/A | N/A | 8830 | 8845 | AGCTTTAAACTCAGGT | kk-d8-kekekk | 16 | 1920 |
| 969295 | N/A | N/A | 5858 | 5873 | CAGTTTTGTAAGTGCA | kk-d8-kekekk | 18 | 1577 |
| 969305 | N/A | N/A | 8744 | 8759 | ATTCTATTAGAGGGCT | kk-d8-kekekk | 34 | 1326 |
| 969315 | N/A | N/A | 5853 | 5868 | TTGTAAGTGCAACCAA | kk-d9-eeekk | 83 | 1025 |
| 969325 | N/A | N/A | 8365 | 8380 | TTTATACCAGTGTCTT | kk-d9-eeekk | 88 | 1914 |
| 969335 | 2251 | 2266 | 14342 | 14357 | CGTCAATATATTCTTT | kk-d9-eeekk | 81 | 1925 |
| 969345 | N/A | N/A | 7922 | 7937 | GGAATTATGGAATTGC | kk-d9-eeekk | 99 | 1249 |
| 969355 | N/A | N/A | 8307 | 8322 | GGTTCAAAAGCAGCAT | kk-d9-eeekk | 95 | 978 |
| 969365 | N/A | N/A | 6703 | 6718 | TGTATTTCTTGATGTG | kk-d9-eeekk | 87 | 1926 |
| 969385 | N/A | N/A | 5856 | 5871 | GTTTTGTAAGTGCAAC | kk-d9-eeekk | 83 | 1230 |
| 969395 | N/A | N/A | 8368 | 8383 | CACTTTATACCAGTGT | kk-d9-eeekk | 0 | 1908 |
| 969405 | N/A | N/A | 5853 | 5868 | TTGTAAGTGCAACCAA | kk-d9-ekeke | 87 | 1025 |
| 969415 | N/A | N/A | 8365 | 8380 | TTTATACCAGTGTCTT | kk-d9-ekeke | 90 | 1914 |
| 969425 | 2251 | 2266 | 14342 | 14357 | CGTCAATATATTCTTT | kk-d9-ekeke | 90 | 1925 |
| 969435 | N/A | N/A | 7922 | 7937 | GGAATTATGGAATTGC | kk-d9-ekeke | 97 | 1249 |
| 969445 | N/A | N/A | 8308 | 8323 | TGGTTCAAAAGCAGCA | kk-d9-ekeke | 82 | 1048 |
| 969455 | N/A | N/A | 5860 | 5875 | GGCAGTTTTGTAAGTG | kk-d9-ekeke | 75 | 123 |
| 969465 | N/A | N/A | 8745 | 8760 | AATTCTATTAGAGGGC | kk-d9-ekeke | 79 | 1396 |
| 969475 | N/A | N/A | 5449 | 5464 | GTTATATTTGATCCTC | kk-d9-kdkdk | 93 | 1900 |
| 969485 | N/A | N/A | 8332 | 8347 | CACATCATTGGGTTAT | kk-d9-kdkdk | 79 | 356 |
| 969495 | 1033 | 1048 | 13124 | 13139 | GAAGATTGGCTCTGGC | kk-d9-kdkdk | 79 | 1480 |
| 969505 | N/A | N/A | 6818 | 6833 | ACGCAATGCTGACTTG | kk-d9-kdkdk | 85 | 1905 |
| 971915 | N/A | N/A | 8829 | 8844 | GCTTTAAACTCAGGTG | kk-d9-kekek | 86 | 81 |
| 971925 | N/A | N/A | 6701 | 6716 | TATTTCTTGATGTGGT | kk-d9-kekek | 97 | 1904 |
| 971935 | N/A | N/A | 8828 | 8843 | CTTTAAACTCAGGTGA | kk-d9-kekek | 82 | 151 |
| 971945 | N/A | N/A | 5414 | 5429 | TTATTCTCATGGTACA | kk-d9-kekek | 47 | 1927 |
| 971955 | N/A | N/A | 8239 | 8254 | GTGAGTATTGTTTTTG | kk-d9-kekek | 88 | 1928 |
| 971965 | 970 | 985 | 13061 | 13076 | AAGTATTGCCAGCTAA | kk-d9-kekek | 62 | 1911 |
| 971975 | N/A | N/A | 6702 | 6717 | GTATTTCTTGATGTGG | kk-d9-kekek | 75 | 413 |
| 971995 | 2251 | 2266 | 14342 | 14357 | CGTCAATATATTCTTT | kkk-d8-kdkdk | 95 | 1925 |
| 972005 | N/A | N/A | 6818 | 6833 | ACGCAATGCTGACTTG | kkk-d8-kdkdk | 70 | 1905 |
| 972025 | N/A | N/A | 5857 | 5872 | AGTTTTGTAAGTGCAA | kkk-d8-kekek | 77 | 1917 |
| 972035 | N/A | N/A | 8742 | 8757 | TCTATTAGAGGGCTAG | kkk-d8-kekek | 23 | 150 |
| 972045 | 2342 | 2357 | 14433 | 14448 | CTGTTCTAACTCTTGG | kkk-d8-kekek | 88 | 383 |
| 972055 | N/A | N/A | 7924 | 7939 | TGGGAATTATGGAATT | kkk-d8-kekek | 56 | 1929 |
| 972065 | N/A | N/A | 8830 | 8845 | AGCTTTAAACTCAGGT | kkk-d8-kekek | 64 | 1920 |
| 972075 | N/A | N/A | 5858 | 5873 | CAGTTTTGTAAGTGCA | kkk-d8-kekek | 87 | 1577 |
| 972085 | N/A | N/A | 8744 | 8759 | ATTCTATTAGAGGGCT | kkk-d8-kekek | 37 | 1326 |
| 972095 | N/A | N/A | 5450 | 5465 | TGTTATATTTGATCCT | kkk-d9-keke | 71 | 1887 |
| 972105 | N/A | N/A | 8322 | 8337 | GGTTATGAAATTATTG | kkk-d9-keke | 88 | 1930 |
| 972115 | 1033 | 1048 | 13124 | 13139 | GAAGATTGGCTCTGGC | kkk-d9-keke | 75 | 1480 |
| 972125 | N/A | N/A | 6818 | 6833 | ACGCAATGCTGACTTG | kkk-d9-keke | 87 | 1905 |
| 972145 | N/A | N/A | 6547 | 6562 | TCAGATGGGTACTTCT | kkk-d9-kkke | 82 | 411 |
| 972155 | N/A | N/A | 8743 | 8758 | TTCTATTAGAGGGCTA | kkk-d9-kkke | 85 | 80 |
| 972165 | 2736 | 2751 | 14827 | 14842 | GCTAATTTTCTGACTG | kkk-d9-kkke | 92 | 1283 |
| 972175 | N/A | N/A | 8237 | 8252 | GAGTATTGTTTTTGTG | kkk-d9-kkke | 88 | 1899 |
| 972185 | 1034 | 1049 | 13125 | 13140 | TGAAGATTGGCTCTGG | kkk-d9-kkke | 61 | 1931 |
| 972195 | N/A | N/A | 7923 | 7938 | GGGAATTATGGAATTG | kkk-d9-kkke | 77 | 1596 |

TABLE 31
Inhibition of APOL1 mRNA by deoxy, MOE, and cEt gapmers targeting SEQ ID NO: 1 and 2

| | SEQ | SEQ | SEQ | SEQ | | | | |
|---|---|---|---|---|---|---|---|---|
| | ID: 1 | ID: 1 | ID: 2 | ID: 2 | | | | SEQ |
| Compound | Start | Stop | Start | Stop | | | % | ID |
| Number | Site | Site | Site | Site | Sequence | Chemistry | inhibition | NO |
| 903822 | 970 | 985 | 13061 | 13076 | AAGTATTGCCAGCTAA | kkk-d10-kkk | 90 | 1911 |
| 905095 | N/A | N/A | 6702 | 6717 | GTATTTCTTGATGTGG | kkk-d10-kkk | 100 | 413 |
| 905491 | N/A | N/A | 8237 | 8252 | GAGTATTGTTTTTGTG | kkk-d10-kkk | 94 | 1899 |
| 969056 | 968 | 983 | 13059 | 13074 | GTATTGCCAGCTAAGG | k-d10-kekek | 93 | 1410 |
| 969066 | N/A | N/A | 7920 | 7935 | AATTATGGAATTGCAG | k-d10-kekek | 52 | 1923 |
| 969076 | N/A | N/A | 8830 | 8845 | AGCTTTAAACTCAGGT | k-d10-kekek | 95 | 1920 |
| 969086 | N/A | N/A | 5854 | 5869 | TTTGTAAGTGCAACCA | k-d10-kekek | 99 | 1095 |
| 969096 | N/A | N/A | 8366 | 8381 | CTTTATACCAGTGTCT | k-d10-kekek | 89 | 1890 |
| 969106 | N/A | N/A | 5447 | 5462 | TATATTTGATCCTCAA | k-d9-kekeke | 75 | 1932 |
| 969116 | N/A | N/A | 8331 | 8346 | ACATCATTGGGTTATG | k-d9-kekeke | 76 | 286 |
| 969126 | 1033 | 1048 | 13124 | 13139 | GAAGATTGGCTCTGGC | k-d9-kekeke | 21 | 1480 |
| 969136 | N/A | N/A | 6702 | 6717 | GTATTTCTTGATGTGG | k-d9-kekeke | 87 | 413 |
| 969146 | N/A | N/A | 8829 | 8844 | GCTTTAAACTCAGGTG | k-d9-kekeke | 67 | 81 |
| 969156 | N/A | N/A | 5412 | 5427 | ATTCTCATGGTACAGG | kek-d9-eekk | 96 | 677 |
| 969166 | N/A | N/A | 8237 | 8252 | GAGTATTGTTTTTGTG | kek-d9-eekk | 90 | 1899 |
| 969176 | 969 | 984 | 13060 | 13075 | AGTATTGCCAGCTAAG | kk-d10-keke | 86 | 1479 |
| 969186 | N/A | N/A | 6817 | 6832 | CGCAATGCTGACTTGG | kk-d10-keke | 96 | 1924 |
| 969206 | N/A | N/A | 5450 | 5465 | TGTTATATTTGATCCT | kk-d10-keke | 92 | 1887 |
| 969216 | N/A | N/A | 8333 | 8348 | ACACATCATTGGGTTA | kk-d10-keke | 72 | 426 |
| 969226 | N/A | N/A | 5448 | 5463 | TTATATTTGATCCTCA | kk-d8-eeeekk | 91 | 1909 |
| 969236 | N/A | N/A | 8320 | 8335 | TTATGAAATTATTGGT | kk-d8-eeeekk | 35 | 1910 |
| 969246 | 1031 | 1046 | 13122 | 13137 | AGATTGGCTCTGGCTC | kk-d8-kekekk | 18 | 654 |
| 969256 | N/A | N/A | 8162 | 8177 | TTCAGAATTTCCACTA | kk-d8-kekekk | 58 | 1186 |
| 969266 | 969 | 984 | 13060 | 13075 | AGTATTGCCAGCTAAG | kk-d8-kekekk | 34 | 1479 |
| 969276 | N/A | N/A | 7921 | 7936 | GAATTATGGAATTGCA | kk-d8-kekekk | 61 | 1183 |
| 969286 | N/A | N/A | 8306 | 8321 | GTTCAAAAGCAGCATT | kk-d8-kekekk | 34 | 13 |
| 969296 | N/A | N/A | 6548 | 6563 | ATCAGATGGGTACTTC | kk-d8-kekekk | 45 | 481 |
| 969316 | N/A | N/A | 5857 | 5872 | AGTTTTGTAAGTGCAA | kk-d9-eeekk | 94 | 1917 |
| 969326 | N/A | N/A | 8742 | 8757 | TCTATTAGAGGGCTAG | kk-d9-eeekk | 67 | 150 |
| 969336 | 2340 | 2355 | 14431 | 14446 | GTTCTAACTCTTGGGC | kk-d9-eeekk | 91 | 243 |
| 969346 | N/A | N/A | 8164 | 8179 | CATTCAGAATTTCCAC | kk-d9-eeekk | 78 | 1730 |
| 969356 | 971 | 986 | 13062 | 13077 | TAAGTATTGCCAGCTA | kk-d9-eeekk | 79 | 1918 |
| 969366 | N/A | N/A | 6819 | 6834 | AACGCAATGCTGACTT | kk-d9-eeekk | 82 | 1919 |
| 969376 | N/A | N/A | 8832 | 8847 | GAAGCTTTAAACTCAG | kk-d9-eeekk | 72 | 1397 |
| 969386 | N/A | N/A | 5860 | 5875 | GGCAGTTTTGTAAGTG | kk-d9-eeekk | 80 | 123 |
| 969396 | N/A | N/A | 8746 | 8761 | TAATTCTATTAGAGGG | kk-d9-eeekk | 59 | 220 |
| 969406 | N/A | N/A | 5857 | 5872 | AGTTTTGTAAGTGCAA | kk-d9-ekeke | 91 | 1917 |
| 969416 | N/A | N/A | 8742 | 8757 | TCTATTAGAGGGCTAG | kk-d9-ekeke | 67 | 150 |
| 969426 | 2340 | 2355 | 14431 | 14446 | GTTCTAACTCTTGGGC | kk-d9-ekeke | 78 | 243 |
| 969436 | N/A | N/A | 8164 | 8179 | CATTCAGAATTTCCAC | kk-d9-ekeke | 87 | 1730 |
| 969446 | 972 | 987 | 13063 | 13078 | GTAAGTATTGCCAGCT | kk-d9-ekeke | 69 | 1933 |
| 969456 | N/A | N/A | 6550 | 6565 | ATATCAGATGGGTACT | kk-d9-ekeke | 27 | 620 |
| 969466 | N/A | N/A | 8746 | 8761 | TAATTCTATTAGAGGG | kk-d9-ekeke | 46 | 220 |
| 969476 | N/A | N/A | 5853 | 5868 | TTGTAAGTGCAACCAA | kk-d9-kdkdk | 74 | 1025 |
| 969486 | N/A | N/A | 8365 | 8380 | TTTATACCAGTGTCTT | kk-d9-kdkdk | 81 | 1914 |
| 969496 | 2251 | 2266 | 14342 | 14357 | CGTCAATATATTCTTT | kk-d9-kdkdk | 91 | 1925 |
| 969506 | N/A | N/A | 7922 | 7937 | GGAATTATGGAATTGC | kk-d9-kdkdk | 89 | 1249 |
| 971916 | 969 | 984 | 13060 | 13075 | AGTATTGCCAGCTAAG | kk-d9-kekek | 65 | 1479 |
| 971926 | N/A | N/A | 6817 | 6832 | CGCAATGCTGACTTGG | kk-d9-kekek | 83 | 1924 |
| 971946 | N/A | N/A | 5451 | 5466 | GTGTTATATTTGATCC | kk-d9-kekek | 78 | 1934 |
| 971956 | N/A | N/A | 8323 | 8338 | GGGTTATGAAATTATT | kk-d9-kekek | 84 | 1935 |
| 971966 | 1033 | 1048 | 13124 | 13139 | GAAGATTGGCTCTGGC | kk-d9-kekek | 48 | 1480 |
| 971976 | N/A | N/A | 6818 | 6833 | ACGCAATGCTGACTTG | kk-d9-kekek | 79 | 1905 |
| 971996 | 2340 | 2355 | 14431 | 14446 | GTTCTAACTCTTGGGC | kkk-d8-kdkdk | 73 | 243 |
| 972006 | N/A | N/A | 7922 | 7937 | GGAATTATGGAATTGC | kkk-d8-kdkdk | 76 | 1249 |
| 972026 | N/A | N/A | 6547 | 6562 | TCAGATGGGTACTTCT | kkk-d8-kekek | 50 | 411 |
| 972036 | N/A | N/A | 8743 | 8758 | TTCTATTAGAGGGCTA | kkk-d8-kekek | 42 | 80 |
| 972046 | 2738 | 2753 | 14829 | 14844 | ATGCTAATTTTCTGAC | kkk-d8-kekek | 95 | 1912 |
| 972056 | N/A | N/A | 8166 | 8181 | GGCATTCAGAATTTCC | kkk-d8-kekek | 20 | 1913 |
| 972066 | N/A | N/A | 8306 | 8321 | GTTCAAAAGCAGCATT | kkk-d8-kekek | 24 | 13 |
| 972076 | N/A | N/A | 6548 | 6563 | ATCAGATGGGTACTTC | kkk-d8-kekek | 54 | 481 |
| 972096 | N/A | N/A | 5451 | 5466 | GTGTTATATTTGATCC | kkk-d9-keke | 96 | 1981 |
| 972106 | N/A | N/A | 8334 | 8349 | AACACATCATTGGGTT | kkk-d9-keke | 21 | 496 |
| 972116 | 2251 | 2266 | 14342 | 14357 | CGTCAATATATTCTTT | kkk-d9-keke | 94 | 1925 |
| 972126 | N/A | N/A | 7922 | 7937 | GGAATTATGGAATTGC | kkk-d9-keke | 55 | 1249 |
| 972136 | N/A | N/A | 8829 | 8844 | GCTTTAAACTCAGGTG | kkk-d9-kkke | 74 | 81 |
| 972146 | N/A | N/A | 6701 | 6716 | TATTTCTTGATGTGGT | kkk-d9-kkke | 99 | 1904 |
| 972156 | N/A | N/A | 8828 | 8843 | CTTTAAACTCAGGTGA | kkk-d9-kkke | 59 | 151 |
| 972166 | N/A | N/A | 5412 | 5427 | ATTCTCATGGTACAGG | kkk-d9-kkke | 93 | 677 |
| 972176 | N/A | N/A | 8321 | 8336 | GTTATGAAATTATTGG | kkk-d9-kkke | 96 | 76 |
| 972186 | 2252 | 2267 | 14343 | 14358 | CCGTCAATATATTCTT | kkk-d9-kkke | 98 | 1936 |
| 972196 | N/A | N/A | 8165 | 8180 | GCATTCAGAATTTCCA | kkk-d9-kkke | 95 | 1937 |

TABLE 32
Inhibition of APOL1 mRNA by deoxy MOE, and cEt gapmers targeting SEQ ID NO: 1 and 2

| | SEQ | SEQ | SEQ | SEQ | | | | |
|---|---|---|---|---|---|---|---|---|
| | ID: 1 | ID: 1 | ID: 2 | ID: 2 | | | | SEQ |
| Compound | Start | Stop | Start | Stop | | | % | ID |
| Number | Site | Site | Site | Site | Sequence | Chemistry | inhibition | NO |
| 904082 | 2251 | 2266 | 14342 | 14357 | CGTCAATATATTCTTT | kkk-d10-kkk | 94 | 1925 |
| 905095 | N/A | N/A | 6702 | 6717 | GTATTTCTTGATGTGG | kkk-d10-kkk | 100 | 413 |
| 905491 | N/A | N/A | 8237 | 8252 | GAGTATTGTTTTTGTG | kkk-d10-kkk | 94 | 1899 |
| 969057 | 1031 | 1046 | 13122 | 13137 | AGATTGGCTCTGGCTC | k-d10-kekek | 40 | 654 |
| 969067 | N/A | N/A | 8162 | 8177 | TTCAGAATTTCCACTA | k-d10-kekek | 87 | 1186 |
| 969077 | N/A | N/A | 8306 | 8321 | GTTCAAAAGCAGCATT | k-d10-kekek | 79 | 13 |
| 969087 | N/A | N/A | 5858 | 5873 | CAGTTTTGTAAGTGCA | k-d10-kekek | 92 | 1577 |
| 969097 | N/A | N/A | 8743 | 8758 | TTCTATTAGAGGGCTA | k-d10-kekek | 45 | 80 |
| 969107 | N/A | N/A | 5448 | 5463 | TTATATTTGATCCTCA | k-d9-kekeke | 39 | 1909 |
| 969117 | N/A | N/A | 8364 | 8379 | TTATACCAGTGTCTTC | k-d9-kekeke | 82 | 1938 |
| 969127 | 2251 | 2266 | 14342 | 14357 | CGTCAATATATTCTTT | k-d9-kekeke | 96 | 1925 |
| 969137 | N/A | N/A | 6818 | 6833 | ACGCAATGCTGACTTG | k-d9-kekeke | 72 | 1905 |
| 969157 | N/A | N/A | 5449 | 5464 | GTTATATTTGATCCTC | kek-d9-eekk | 99 | 1900 |
| 969167 | N/A | N/A | 8321 | 8336 | GTTATGAAATTATTGG | kek-d9-eekk | 90 | 76 |
| 969177 | 1032 | 1047 | 13123 | 13138 | AAGATTGGCTCTGGCT | kk-d10-keke | 65 | 1411 |
| 969187 | N/A | N/A | 7921 | 7936 | GAATTATGGAATTGCA | kk-d10-keke | 92 | 1183 |
| 969207 | N/A | N/A | 5854 | 5869 | TTTGTAAGTGCAACCA | kk-d10-keke | 92 | 1095 |
| 969217 | N/A | N/A | 8366 | 8381 | CTTTATACCAGTGTCT | kk-d10-keke | 97 | 1890 |
| 969227 | N/A | N/A | 5449 | 5464 | GTTATATTTGATCCTC | kk-d8-eeeekk | 69 | 1900 |
| 969237 | N/A | N/A | 8332 | 8347 | CACATCATTGGGTTAT | kk-d8-eeeekk | 54 | 356 |
| 969247 | N/A | N/A | 5410 | 5425 | TCTCATGGTACAGGAG | kk-d8-kekekk | 26 | 537 |
| 969257 | N/A | N/A | 8235 | 8250 | GTATTGTTTTTGTGGG | kk-d8-kekekk | 39 | 1921 |
| 969267 | 1032 | 1047 | 13123 | 13138 | AAGATTGGCTCTGGCT | kk-d8-kekekk | 2 | 1411 |
| 969277 | N/A | N/A | 8163 | 8178 | ATTCAGAATTTCCACT | kk-d8-kekekk | 57 | 1902 |
| 969287 | 970 | 985 | 13061 | 13076 | AAGTATTGCCAGCTAA | kk-d8-kekekk | 27 | 1911 |
| 969297 | N/A | N/A | 6702 | 6717 | GTATTTCTTGATGTGG | kk-d8-kekekk | 52 | 413 |
| 969317 | N/A | N/A | 6547 | 6562 | TCAGATGGGTACTTCT | kk-d9-eeekk | 88 | 411 |
| 969327 | N/A | N/A | 8743 | 8758 | TTCTATTAGAGGGCTA | kk-d9-eeekk | 87 | 80 |
| 969337 | 2736 | 2751 | 14827 | 14842 | GCTAATTTTCTGACTG | kk-d9-eeekk | 94 | 1283 |
| 969347 | N/A | N/A | 8237 | 8252 | GAGTATTGTTTTTGTG | kk-d9-eeekk | 97 | 1899 |
| 969357 | 1034 | 1049 | 13125 | 13140 | TGAAGATTGGCTCTGG | kk-d9-eeekk | 82 | 1931 |
| 969367 | N/A | N/A | 7923 | 7938 | GGGAATTATGGAATTG | kk-d9-eeekk | 86 | 1596 |
| 969377 | N/A | N/A | 8308 | 8323 | TGGTTCAAAAGCAGCA | kk-d9-eeekk | 93 | 1048 |
| 969387 | N/A | N/A | 6550 | 6565 | ATATCAGATGGGTACT | kk-d9-eeekk | 52 | 620 |
| 969407 | N/A | N/A | 6547 | 6562 | TCAGATGGGTACTTCT | kk-d9-ekeke | 91 | 411 |
| 969417 | N/A | N/A | 8743 | 8758 | TTCTATTAGAGGGCTA | kk-d9-ekeke | 85 | 80 |
| 969427 | 2736 | 2751 | 14827 | 14842 | GCTAATTTTCTGACTG | kk-d9-ekeke | 88 | 1283 |
| 969437 | N/A | N/A | 8237 | 8252 | GAGTATTGTTTTTGTG | kk-d9-ekeke | 98 | 1899 |
| 969447 | 1035 | 1050 | 13126 | 13141 | CTGAAGATTGGCTCTG | kk-d9-ekeke | 53 | 1939 |
| 969457 | N/A | N/A | 6704 | 6719 | GTGTATTTCTTGATGT | kk-d9-ekeke | 94 | 1940 |
| 969467 | N/A | N/A | 8831 | 8846 | AAGCTTTAAACTCAGG | kk-d9-ekeke | 95 | 1327 |
| 969477 | N/A | N/A | 5857 | 5872 | AGTTTTGTAAGTGCAA | kk-d9-kdkdk | 91 | 1917 |
| 969487 | N/A | N/A | 8742 | 8757 | TCTATTAGAGGGCTAG | kk-d9-kdkdk | 68 | 150 |
| 969497 | 2340 | 2355 | 14431 | 14446 | GTTCTAACTCTTGGGC | kk-d9-kdkdk | 90 | 243 |
| 969507 | N/A | N/A | 8164 | 8179 | CATTCAGAATTTCCAC | kk-d9-kdkdk | 84 | 1730 |
| 971917 | 1032 | 1047 | 13123 | 13138 | AAGATTGGCTCTGGCT | kk-d9-kekek | 37 | 1411 |
| 971927 | N/A | N/A | 7921 | 7936 | GAATTATGGAATTGCA | kk-d9-kekek | 51 | 1183 |
| 971947 | N/A | N/A | 5452 | 5467 | CGTGTTATATTTGATC | kk-d9-kekek | 88 | 1906 |
| 971957 | N/A | N/A | 8335 | 8350 | CAACACATCATTGGGT | kk-d9-kekek | 43 | 1907 |
| 971967 | 2251 | 2266 | 14342 | 14357 | CGTCAATATATTCTTT | kk-d9-kekek | 94 | 1925 |
| 971977 | N/A | N/A | 7922 | 7937 | GGAATTATGGAATTGC | kk-d9-kekek | 82 | 1249 |
| 971997 | 2736 | 2751 | 14827 | 14842 | GCTAATTTTCTGACTG | kkk-d8-kdkdk | 93 | 1283 |
| 972007 | N/A | N/A | 8164 | 8179 | CATTCAGAATTTCCAC | kkk-d8-kdkdk | 88 | 1730 |
| 972017 | N/A | N/A | 8829 | 8844 | GCTTTAAACTCAGGTG | kkk-d8-kekek | 68 | 81 |
| 972027 | N/A | N/A | 6701 | 6716 | TATTTCTTGATGTGGT | kkk-d8-kekek | 95 | 1904 |
| 972037 | N/A | N/A | 8828 | 8843 | CTTTAAACTCAGGTGA | kkk-d8-kekek | 40 | 151 |
| 972047 | N/A | N/A | 5414 | 5429 | TTATTCTCATGGTACA | kkk-d8-kekek | 53 | 1927 |
| 972057 | N/A | N/A | 8239 | 8254 | GTGAGTATTGTTTTTG | kkk-d8-kekek | 85 | 1928 |
| 972067 | 970 | 985 | 13061 | 13076 | AAGTATTGCCAGCTAA | kkk-d8-kekek | 47 | 1911 |
| 972077 | N/A | N/A | 6702 | 6717 | GTATTTCTTGATGTGG | kkk-d8-kekek | 73 | 413 |
| 972097 | N/A | N/A | 5855 | 5870 | TTTTGTAAGTGCAACC | kkk-d9-keke | 98 | 1164 |
| 972107 | N/A | N/A | 8367 | 8382 | ACTTTATACCAGTGTC | kkk-d9-keke | 65 | 1941 |
| 972117 | 2340 | 2355 | 14431 | 14446 | GTTCTAACTCTTGGGC | kkk-d9-keke | 66 | 243 |
| 972127 | N/A | N/A | 8164 | 8179 | CATTCAGAATTTCCAC | kkk-d9-keke | 86 | 1730 |
| 972137 | 969 | 984 | 13060 | 13075 | AGTATTGCCAGCTAAG | kkk-d9-kkke | 89 | 1479 |
| 972147 | N/A | N/A | 6817 | 6832 | CGCAATGCTGACTTGG | kkk-d9-kkke | 94 | 1924 |
| 972167 | N/A | N/A | 5450 | 5465 | TGTTATATTTGATCCT | kkk-d9-kkke | 89 | 1887 |
| 972177 | N/A | N/A | 8333 | 8348 | ACACATCATTGGGTTA | kkk-d9-kkke | 59 | 426 |
| 972187 | 2341 | 2356 | 14432 | 14447 | TGTTCTAACTCTTGGG | kkk-d9-kkke | 89 | 313 |
| 972197 | N/A | N/A | 8238 | 8253 | TGAGTATTGTTTTTGT | kkk-d9-kkke | 95 | 1916 |

TABLE 33
Inhibition of APOL1 mRNA by deoxy, MOE, and cEt gapmers targeting SEQ ID NO: 1 and 2

| | SEQ | SEQ | SEQ | SEQ | | | | |
|---|---|---|---|---|---|---|---|---|
| | ID: 1 | ID: 1 | ID: 2 | ID: 2 | | | | SEQ |
| Compound | Start | Stop | Start | Stop | | | % | ID |
| Number | Site | Site | Site | Site | Sequence | Chemistry | inhibition | NO |
| 904619 | N/A | N/A | 5412 | 5427 | ATTCTCATGGTACAGG | kkk-d10-kkk | 97 | 677 |
| 905095 | N/A | N/A | 6702 | 6717 | GTATTTCTTGATGTGG | kkk-d10-kkk | 100 | 413 |
| 905491 | N/A | N/A | 8237 | 8252 | GAGTATTGTTTTTGTG | kkk-d10-kkk | 94 | 1899 |
| 969058 | N/A | N/A | 5410 | 5425 | TCTCATGGTACAGGAG | k-d10-kekek | 61 | 537 |
| 969068 | N/A | N/A | 8235 | 8250 | GTATTGTTTTTGTGGG | k-d10-kekek | 77 | 1921 |
| 969078 | 970 | 985 | 13061 | 13076 | AAGTATTGCCAGCTAA | k-d10-kekek | 54 | 1911 |
| 969088 | N/A | N/A | 6548 | 6563 | ATCAGATGGGTACTTC | k-d10-kekek | 73 | 481 |
| 969098 | N/A | N/A | 8744 | 8759 | ATTCTATTAGAGGGCT | k-d10-kekek | 45 | 1326 |
| 969108 | N/A | N/A | 5852 | 5867 | TGTAAGTGCAACCAAT | k-d9-kekeke | 67 | 955 |
| 969118 | N/A | N/A | 8741 | 8756 | CTATTAGAGGGCTAGT | k-d9-kekeke | 34 | 1674 |
| 969128 | 2340 | 2355 | 14431 | 14446 | GTTCTAACTCTTGGGC | k-d9-kekeke | 77 | 243 |
| 969138 | N/A | N/A | 7922 | 7937 | GGAATTATGGAATTGC | k-d9-kekeke | 88 | 1249 |
| 969158 | N/A | N/A | 5450 | 5465 | TGTTATATTTGATCCT | kek-d9-eekk | 94 | 1887 |
| 969168 | N/A | N/A | 8333 | 8348 | ACACATCATTGGGTTA | kek-d9-eekk | 87 | 426 |
| 969178 | 2735 | 2750 | 14826 | 14841 | CTAATTTTCTGACTGT | kk-d10-keke | 98 | 1901 |
| 969188 | N/A | N/A | 8163 | 8178 | ATTCAGAATTTCCACT | kk-d10-keke | 88 | 1902 |
| 969198 | N/A | N/A | 8830 | 8845 | AGCTTTAAACTCAGGT | kk-d10-keke | 94 | 1920 |
| 969208 | N/A | N/A | 5858 | 5873 | CAGTTTTGTAAGTGCA | kk-d10-keke | 94 | 1577 |
| 969218 | N/A | N/A | 8744 | 8759 | ATTCTATTAGAGGGCT | kk-d10-keke | 78 | 1326 |
| 969228 | N/A | N/A | 5853 | 5868 | TTGTAAGTGCAACCAA | kk-d8-eeeekk | 70 | 1025 |
| 969238 | N/A | N/A | 8365 | 8380 | TTTATACCAGTGTCTT | kk-d8-eeeekk | 89 | 1914 |
| 969248 | N/A | N/A | 5447 | 5462 | TATATTTGATCCTCAA | kk-d8-kekekk | 77 | 1932 |
| 969258 | N/A | N/A | 8331 | 8346 | ACATCATTGGGTTATG | kk-d8-kekekk | 70 | 286 |
| 969268 | 2735 | 2750 | 14826 | 14841 | CTAATTTTCTGACTGT | kk-d8-kekekk | 71 | 1901 |
| 969278 | N/A | N/A | 8236 | 8251 | AGTATTGTTTTTGTGG | kk-d8-kekekk | 66 | 1922 |
| 969288 | 1033 | 1048 | 13124 | 13139 | GAAGATTGGCTCTGGC | kk-d8-kekekk | 10 | 1480 |
| 969298 | N/A | N/A | 6818 | 6833 | ACGCAATGCTGACTTG | kk-d8-kekekk | 72 | 1905 |
| 969308 | N/A | N/A | 8829 | 8844 | GCTTTAAACTCAGGTG | kk-d9-eeekk | 91 | 81 |
| 969318 | N/A | N/A | 6701 | 6716 | TATTTCTTGATGTGGT | kk-d9-eeekk | 99 | 1904 |
| 969328 | N/A | N/A | 8828 | 8843 | CTTTAAACTCAGGTGA | kk-d9-eeekk | 92 | 151 |
| 969338 | N/A | N/A | 5412 | 5427 | ATTCTCATGGTACAGG | kk-d9-eeekk | 92 | 677 |
| 969348 | N/A | N/A | 8321 | 8336 | GTTATGAAATTATTGG | kk-d9-eeekk | 54 | 76 |
| 969358 | 2252 | 2267 | 14343 | 14358 | CCGTCAATATATTCTT | kk-d9-eeekk | 98 | 1936 |
| 969368 | N/A | N/A | 8165 | 8180 | GCATTCAGAATTTCCA | kk-d9-eeekk | 98 | 1937 |
| 969378 | 972 | 987 | 13063 | 13078 | GTAAGTATTGCCAGCT | kk-d9-eeekk | 89 | 1933 |
| 969388 | N/A | N/A | 6704 | 6719 | GTGTATTTCTTGATGT | kk-d9-eeekk | 96 | 1940 |
| 969398 | N/A | N/A | 8829 | 8844 | GCTTTAAACTCAGGTG | kk-d9-ekeke | 92 | 81 |
| 969408 | N/A | N/A | 6701 | 6716 | TATTTCTTGATGTGGT | kk-d9-ekeke | 99 | 1904 |
| 969418 | N/A | N/A | 8828 | 8843 | CTTTAAACTCAGGTGA | kk-d9-ekeke | 91 | 151 |
| 969428 | N/A | N/A | 5412 | 5427 | ATTCTCATGGTACAGG | kk-d9-ekeke | 95 | 677 |
| 969438 | N/A | N/A | 8321 | 8336 | GTTATGAAATTATTGG | kk-d9-ekeke | 68 | 76 |
| 969448 | 2253 | 2268 | 14344 | 14359 | TCCGTCAATATATTCT | kk-d9-ekeke | 97 | 1897 |
| 969458 | N/A | N/A | 6820 | 6835 | GAACGCAATGCTGACT | kk-d9-ekeke | 95 | 1888 |
| 969478 | N/A | N/A | 6547 | 6562 | TCAGATGGGTACTTCT | kk-d9-kdkdk | 88 | 411 |
| 969488 | N/A | N/A | 8743 | 8758 | TTCTATTAGAGGGCTA | kk-d9-kdkdk | 87 | 80 |
| 969498 | 2736 | 2751 | 14827 | 14842 | GCTAATTTTCTGACTG | kk-d9-kdkdk | 93 | 1283 |
| 969508 | N/A | N/A | 8237 | 8252 | GAGTATTGTTTTTGTG | kk-d9-kdkdk | 92 | 1899 |
| 971918 | 2735 | 2750 | 14826 | 14841 | CTAATTTTCTGACTGT | kk-d9-kekek | 83 | 1901 |
| 971928 | N/A | N/A | 8163 | 8178 | ATTCAGAATTTCCACT | kk-d9-kekek | 76 | 1902 |
| 971938 | N/A | N/A | 8832 | 8847 | GAAGCTTTAAACTCAG | kk-d9-kekek | 84 | 1397 |
| 971948 | N/A | N/A | 5856 | 5871 | GTTTTGTAAGTGCAAC | kk-d9-kekek | 88 | 1230 |
| 971958 | N/A | N/A | 8368 | 8383 | CACTTTATACCAGTGT | kk-d9-kekek | 14 | 1908 |
| 971968 | 2340 | 2355 | 14431 | 14446 | GTTCTAACTCTTGGGC | kk-d9-kekek | 61 | 243 |
| 971978 | N/A | N/A | 8164 | 8179 | CATTCAGAATTTCCAC | kk-d9-kekek | 76 | 1730 |
| 971998 | N/A | N/A | 5412 | 5427 | ATTCTCATGGTACAGG | kkk-d8-kdkdk | 81 | 677 |
| 972008 | N/A | N/A | 8237 | 8252 | GAGTATTGTTTTTGTG | kkk-d8-kdkdk | 54 | 1899 |
| 972018 | 969 | 984 | 13060 | 13075 | AGTATTGCCAGCTAAG | kkk-d8-kekek | 66 | 1479 |
| 972028 | N/A | N/A | 6817 | 6832 | CGCAATGCTGACTTGG | kkk-d8-kekek | 68 | 1924 |
| 972048 | N/A | N/A | 5451 | 5466 | GTGTTATATTTGATCC | kkk-d8-kekek | 75 | 1934 |
| 972058 | N/A | N/A | 8323 | 8338 | GGGTTATGAAATTATT | kkk-d8-kekek | 73 | 1935 |
| 972068 | 1033 | 1048 | 13124 | 13139 | GAAGATTGGCTCTGGC | kkk-d8-kekek | 16 | 1480 |
| 972078 | N/A | N/A | 6818 | 6833 | ACGCAATGCTGACTTG | kkk-d8-kekek | 71 | 1905 |
| 972088 | N/A | N/A | 8831 | 8846 | AAGCTTTAAACTCAGG | kkk-d9-keke | 84 | 1327 |
| 972098 | N/A | N/A | 5859 | 5874 | GCAGTTTTGTAAGTGC | kkk-d9-keke | 60 | 1647 |
| 972108 | N/A | N/A | 8744 | 8759 | ATTCTATTAGAGGGCT | kkk-d9-keke | 73 | 1326 |
| 972118 | 2736 | 2751 | 14827 | 14842 | GCTAATTTTCTGACTG | kkk-d9-keke | 93 | 1283 |
| 972128 | N/A | N/A | 8237 | 8252 | GAGTATTGTTTTTGTG | kkk-d9-keke | 81 | 1899 |
| 972138 | 1032 | 1047 | 13123 | 13138 | AAGATTGGCTCTGGCT | kkk-d9-kkke | 35 | 1411 |
| 972148 | N/A | N/A | 7921 | 7936 | GAATTATGGAATTGCA | kkk-d9-kkke | 90 | 1183 |
| 972168 | N/A | N/A | 5854 | 5869 | TTTGTAAGTGCAACCA | kkk-d9-kkke | 56 | 1095 |
| 972178 | N/A | N/A | 8366 | 8381 | CTTTATACCAGTGTCT | kkk-d9-kkke | 95 | 1890 |
| 972188 | N/A | N/A | 5413 | 5428 | TATTCTCATGGTACAG | kkk-d9-kkke | 79 | 1915 |
| 972198 | N/A | N/A | 8322 | 8337 | GGTTATGAAATTATTG | kkk-d9-kkke | 91 | 1930 |

TABLE 34
Inhibition of APOL1 mRNA by deoxy, MOE, and cEt gapmers targeting SEQ ID NO: 1 and 2

| | SEQ | SEQ | SEQ | SEQ | | | | |
|---|---|---|---|---|---|---|---|---|
| | ID: 1 | ID: 1 | ID: 2 | ID: 2 | | | | SEQ |
| Compound | Start | Stop | Start | Stop | | | % | ID |
| Number | Site | Site | Site | Site | Sequence | Chemistry | inhibition | NO |
| 904627 | N/A | N/A | 5449 | 5464 | GTTATATTTGATCCTC | kkk-d10-kkk | 100 | 1900 |
| 905095 | N/A | N/A | 6702 | 6717 | GTATTTCTTGATGTGG | kkk-d10-kkk | 100 | 413 |
| 905491 | N/A | N/A | 8237 | 8252 | GAGTATTGTTTTTGTG | kkk-d10-kkk | 94 | 1899 |
| 969059 | N/A | N/A | 5447 | 5462 | TATATTTGATCCTCAA | k-d10-kekek | 89 | 1932 |
| 969069 | N/A | N/A | 8331 | 8346 | ACATCATTGGGTTATG | k-d10-kekek | 89 | 286 |
| 969079 | 1033 | 1048 | 13124 | 13139 | GAAGATTGGCTCTGGC | k-d10-kekek | 44 | 1480 |
| 969089 | N/A | N/A | 6702 | 6717 | GTATTTCTTGATGTGG | k-d10-kekek | 92 | 413 |
| 969099 | N/A | N/A | 8829 | 8844 | GCTTTAAACTCAGGTG | k-d10-kekek | 92 | 81 |
| 969109 | N/A | N/A | 5856 | 5871 | GTTTTGTAAGTGCAAC | k-d9-kekeke | 73 | 1230 |
| 969119 | N/A | N/A | 8742 | 8757 | TCTATTAGAGGGCTAG | k-d9-kekeke | 37 | 150 |
| 969129 | 2736 | 2751 | 14827 | 14842 | GCTAATTTTCTGACTG | k-d9-kekeke | 88 | 1283 |
| 969139 | N/A | N/A | 8164 | 8179 | CATTCAGAATTTCCAC | k-d9-kekeke | 58 | 1730 |
| 969149 | N/A | N/A | 8830 | 8845 | AGCTTTAAACTCAGGT | kek-d9-eekk | 82 | 1920 |
| 969159 | N/A | N/A | 5854 | 5869 | TTTGTAAGTGCAACCA | kek-d9-eekk | 99 | 1095 |
| 969169 | N/A | N/A | 8366 | 8381 | CTTTATACCAGTGTCT | kek-d9-eekk | 95 | 1890 |
| 969179 | N/A | N/A | 5411 | 5426 | TTCTCATGGTACAGGA | kk-d10-keke | 78 | 607 |
| 969189 | N/A | N/A | 8236 | 8251 | AGTATTGTTTTTGTGG | kk-d10-keke | 91 | 1922 |
| 969199 | N/A | N/A | 8306 | 8321 | GTTCAAAAGCAGCATT | kk-d10-keke | 89 | 13 |
| 969209 | N/A | N/A | 6548 | 6563 | ATCAGATGGGTACTTC | kk-d10-keke | 83 | 481 |
| 969229 | N/A | N/A | 5857 | 5872 | AGTTTTGTAAGTGCAA | kk-d8-eeeekk | 94 | 1917 |
| 969239 | N/A | N/A | 8742 | 8757 | TCTATTAGAGGGCTAG | kk-d8-eeeekk | 44 | 150 |
| 969249 | N/A | N/A | 5448 | 5463 | TTATATTTGATCCTCA | kk-d8-kekekk | 69 | 1909 |
| 969259 | N/A | N/A | 8364 | 8379 | TTATACCAGTGTCTTC | kk-d8-kekekk | 68 | 1938 |
| 969269 | N/A | N/A | 5411 | 5426 | TTCTCATGGTACAGGA | kk-d8-kekekk | 20 | 607 |
| 969279 | N/A | N/A | 8320 | 8335 | TTATGAAATTATTGGT | kk-d8-kekekk | 63 | 1910 |
| 969289 | 2251 | 2266 | 14342 | 14357 | CGTCAATATATTCTTT | kk-d8-kekekk | 95 | 1925 |
| 969299 | N/A | N/A | 7922 | 7937 | GGAATTATGGAATTGC | kk-d8-kekekk | 74 | 1249 |
| 969309 | 969 | 984 | 13060 | 13075 | AGTATTGCCAGCTAAG | kk-d9-eeekk | 86 | 1479 |
| 969319 | N/A | N/A | 6817 | 6832 | CGCAATGCTGACTTGG | kk-d9-eeekk | 88 | 1924 |
| 969339 | N/A | N/A | 5450 | 5465 | TGTTATATTTGATCCT | kk-d9-eeekk | 87 | 1887 |
| 969349 | N/A | N/A | 8333 | 8348 | ACACATCATTGGGTTA | kk-d9-eeekk | 51 | 426 |
| 969359 | 2341 | 2356 | 14432 | 14447 | TGTTCTAACTCTTGGG | kk-d9-eeekk | 97 | 313 |
| 969369 | N/A | N/A | 8238 | 8253 | TGAGTATTGTTTTTGT | kk-d9-eeekk | 87 | 1916 |
| 969379 | 1035 | 1050 | 13126 | 13141 | CTGAAGATTGGCTCTG | kk-d9-eeekk | 54 | 1939 |
| 969389 | N/A | N/A | 6820 | 6835 | GAACGCAATGCTGACT | kk-d9-eeekk | 95 | 1888 |
| 969399 | 969 | 984 | 13060 | 13075 | AGTATTGCCAGCTAAG | kk-d9-ekeke | 78 | 1479 |
| 969409 | N/A | N/A | 6817 | 6832 | CGCAATGCTGACTTGG | kk-d9-ekeke | 94 | 1924 |
| 969429 | N/A | N/A | 5450 | 5465 | TGTTATATTTGATCCT | kk-d9-ekeke | 94 | 1887 |
| 969439 | N/A | N/A | 8333 | 8348 | ACACATCATTGGGTTA | kk-d9-ekeke | 64 | 426 |
| 969449 | 2342 | 2357 | 14433 | 14448 | CTGTTCTAACTCTTGG | kk-d9-ekeke | 97 | 383 |
| 969459 | N/A | N/A | 7924 | 7939 | TGGGAATTATGGAATT | kk-d9-ekeke | 78 | 1929 |
| 969469 | N/A | N/A | 8829 | 8844 | GCTTTAAACTCAGGTG | kk-d9-kdkdk | 96 | 81 |
| 969479 | N/A | N/A | 6701 | 6716 | TATTTCTTGATGTGGT | kk-d9-kdkdk | 97 | 1904 |
| 969489 | N/A | N/A | 8828 | 8843 | CTTTAAACTCAGGTGA | kk-d9-kdkdk | 89 | 151 |
| 969499 | N/A | N/A | 5412 | 5427 | ATTCTCATGGTACAGG | kk-d9-kdkdk | 84 | 677 |
| 969509 | N/A | N/A | 8321 | 8336 | GTTATGAAATTATTGG | kk-d9-kdkdk | 71 | 76 |
| 971919 | N/A | N/A | 5411 | 5426 | TTCTCATGGTACAGGA | kk-d9-kekek | 76 | 607 |
| 971929 | N/A | N/A | 8236 | 8251 | AGTATTGTTTTTGTGG | kk-d9-kekek | 75 | 1922 |
| 971939 | N/A | N/A | 8308 | 8323 | TGGTTCAAAAGCAGCA | kk-d9-kekek | 68 | 1048 |
| 971949 | N/A | N/A | 5860 | 5875 | GGCAGTTTTGTAAGTG | kk-d9-kekek | 65 | 123 |
| 971959 | N/A | N/A | 8745 | 8760 | AATTCTATTAGAGGGC | kk-d9-kekek | 56 | 1396 |
| 971969 | 2736 | 2751 | 14827 | 14842 | GCTAATTTTCTGACTG | kk-d9-kekek | 96 | 1283 |
| 971979 | N/A | N/A | 8237 | 8252 | GAGTATTGTTTTTGTG | kk-d9-kekek | 90 | 1899 |
| 971999 | N/A | N/A | 5449 | 5464 | GTTATATTTGATCCTC | kkk-d8-kdkdk | 92 | 1900 |
| 972009 | N/A | N/A | 8321 | 8336 | GTTATGAAATTATTGG | kkk-d8-kdkdk | 91 | 76 |
| 972019 | 1032 | 1047 | 13123 | 13138 | AAGATTGGCTCTGGCT | kkk-d8-kekek | 23 | 1411 |
| 972029 | N/A | N/A | 7921 | 7936 | GAATTATGGAATTGCA | kkk-d8-kekek | 61 | 1183 |
| 972049 | N/A | N/A | 5452 | 5467 | CGTGTTATATTTGATC | kkk-d8-kekek | 82 | 1906 |
| 972059 | N/A | N/A | 8335 | 8350 | CAACACATCATTGGGT | kkk-d8-kekek | 30 | 1907 |
| 972069 | 2251 | 2266 | 14342 | 14357 | CGTCAATATATTCTTT | kkk-d8-kekek | 94 | 1925 |
| 972079 | N/A | N/A | 7922 | 7937 | GGAATTATGGAATTGC | kkk-d8-kekek | 66 | 1249 |
| 972089 | N/A | N/A | 8307 | 8322 | GGTTCAAAAGCAGCAT | kkk-d9-keke | 70 | 978 |
| 972099 | N/A | N/A | 6549 | 6564 | TATCAGATGGGTACTT | kkk-d9-keke | 37 | 550 |
| 972109 | N/A | N/A | 8745 | 8760 | AATTCTATTAGAGGGC | kkk-d9-keke | 82 | 1396 |
| 972119 | N/A | N/A | 5412 | 5427 | ATTCTCATGGTACAGG | kkk-d9-keke | 94 | 677 |
| 972129 | N/A | N/A | 8321 | 8336 | GTTATGAAATTATTGG | kkk-d9-keke | 93 | 76 |
| 972139 | 2735 | 2750 | 14826 | 14841 | CTAATTTTCTGACTGT | kkk-d9-kkke | 99 | 1901 |
| 972149 | N/A | N/A | 8163 | 8178 | ATTCAGAATTTCCACT | kkk-d9-kkke | 89 | 1902 |
| 972159 | N/A | N/A | 8830 | 8845 | AGCTTTAAACTCAGGT | kkk-d9-kkke | 82 | 1920 |
| 972169 | N/A | N/A | 5858 | 5873 | CAGTTTTGTAAGTGCA | kkk-d9-kkke | 92 | 1577 |
| 972179 | N/A | N/A | 8744 | 8759 | ATTCTATTAGAGGGCT | kkk-d9-kkke | 85 | 1326 |
| 972189 | N/A | N/A | 5451 | 5466 | GTGTTATATTTGATCC | kkk-d9-kkke | 94 | 1934 |
| 972199 | N/A | N/A | 8334 | 8349 | AACACATCATTGGGTT | kkk-d9-kkke | 58 | 496 |

TABLE 35
Inhibition of APOL1 mRNA by deoxy, MOE, and cEt gapmers targeting SEQ ID NO: 1 and 2

| | SEQ | SEQ | SEQ | SEQ | | | | |
|---|---|---|---|---|---|---|---|---|
| | ID: 1 | ID: 1 | ID: 2 | ID: 2 | | | | SEQ |
| Compound | Start | Stop | Start | Stop | | | % | ID |
| Number | Site | Site | Site | Site | Sequence | Chemistry | inhibition | NO |
| 904763 | N/A | N/A | 5854 | 5869 | TTTGTAAGTGCAACCA | kkk-d10-kkk | 98 | 1095 |
| 905095 | N/A | N/A | 6702 | 6717 | GTATTTCTTGATGTGG | kkk-d10-kkk | 100 | 413 |
| 905491 | N/A | N/A | 8237 | 8252 | GAGTATTGTTTTTGTG | kkk-d10-kkk | 94 | 1899 |
| 969060 | N/A | N/A | 5448 | 5463 | TTATATTTGATCCTCA | k-d10-kekek | 82 | 1909 |
| 969070 | N/A | N/A | 8364 | 8379 | TTATACCAGTGTCTTC | k-d10-kekek | 82 | 1938 |
| 969080 | 2251 | 2266 | 14342 | 14357 | CGTCAATATATTCTTT | k-d10-kekek | 90 | 1925 |
| 969090 | N/A | N/A | 6818 | 6833 | ACGCAATGCTGACTTG | k-d10-kekek | 71 | 1905 |
| 969110 | N/A | N/A | 6546 | 6561 | CAGATGGGTACTTCTG | k-d9-kekeke | 23 | 341 |
| 969120 | N/A | N/A | 8827 | 8842 | TTTAAACTCAGGTGAC | k-d9-kekeke | 43 | 1675 |
| 969130 | N/A | N/A | 5412 | 5427 | ATTCTCATGGTACAGG | k-d9-kekeke | 51 | 677 |
| 969140 | N/A | N/A | 8237 | 8252 | GAGTATTGTTTTTGTG | k-d9-kekeke | 94 | 1899 |
| 969150 | N/A | N/A | 8306 | 8321 | GTTCAAAAGCAGCATT | kek-d9-eekk | 89 | 13 |
| 969160 | N/A | N/A | 5858 | 5873 | CAGTTTTGTAAGTGCA | kek-d9-eekk | 96 | 1577 |
| 969170 | N/A | N/A | 8743 | 8758 | TTCTATTAGAGGGCTA | kek-d9-eekk | 94 | 80 |
| 969180 | N/A | N/A | 5448 | 5463 | TTATATTTGATCCTCA | kk-d10-keke | 96 | 1909 |
| 969190 | N/A | N/A | 8320 | 8335 | TTATGAAATTATTGGT | kk-d10-keke | 63 | 1910 |
| 969200 | 970 | 985 | 13061 | 13076 | AAGTATTGCCAGCTAA | kk-d10-keke | 73 | 1911 |
| 969210 | N/A | N/A | 6702 | 6717 | GTATTTCTTGATGTGG | kk-d10-keke | 98 | 413 |
| 969230 | N/A | N/A | 6547 | 6562 | TCAGATGGGTACTTCT | kk-d8-eeeekk | 78 | 411 |
| 969240 | N/A | N/A | 8743 | 8758 | TTCTATTAGAGGGCTA | kk-d8-eeeekk | 76 | 80 |
| 969250 | N/A | N/A | 5852 | 5867 | TGTAAGTGCAACCAAT | kk-d8-kekekk | 43 | 955 |
| 969260 | N/A | N/A | 8741 | 8756 | CTATTAGAGGGCTAGT | kk-d8-kekekk | 25 | 1674 |
| 969270 | N/A | N/A | 5449 | 5464 | GTTATATTTGATCCTC | kk-d8-kekekk | 43 | 1900 |
| 969280 | N/A | N/A | 8332 | 8347 | CACATCATTGGGTTAT | kk-d8-kekekk | 34 | 356 |
| 969290 | 2340 | 2355 | 14431 | 14446 | GTTCTAACTCTTGGGC | kk-d8-kekekk | 52 | 243 |
| 969300 | N/A | N/A | 8164 | 8179 | CATTCAGAATTTCCAC | kk-d8-kekekk | 57 | 1730 |
| 969310 | 1032 | 1047 | 13123 | 13138 | AAGATTGGCTCTGGCT | kk-d9-eeekk | 63 | 1411 |
| 969320 | N/A | N/A | 7921 | 7936 | GAATTATGGAATTGCA | kk-d9-eeekk | 94 | 1183 |
| 969340 | N/A | N/A | 5854 | 5869 | TTTGTAAGTGCAACCA | kk-d9-eeekk | 99 | 1095 |
| 969350 | N/A | N/A | 8366 | 8381 | CTTTATACCAGTGTCT | kk-d9-eeekk | 96 | 1890 |
| 969360 | N/A | N/A | 5413 | 5428 | TATTCTCATGGTACAG | kk-d9-eeekk | 71 | 1915 |
| 969370 | N/A | N/A | 8322 | 8337 | GGTTATGAAATTATTG | kk-d9-eeekk | 61 | 1930 |
| 969380 | 2253 | 2268 | 14344 | 14359 | TCCGTCAATATATTCT | kk-d9-eeekk | 96 | 1897 |
| 969390 | N/A | N/A | 7924 | 7939 | TGGGAATTATGGAATT | kk-d9-eeekk | 63 | 1929 |
| 969400 | 1032 | 1047 | 13123 | 13138 | AAGATTGGCTCTGGCT | kk-d9-ekeke | 66 | 1411 |
| 969410 | N/A | N/A | 7921 | 7936 | GAATTATGGAATTGCA | kk-d9-ekeke | 95 | 1183 |
| 969430 | N/A | N/A | 5854 | 5869 | TTTGTAAGTGCAACCA | kk-d9-ekeke | 97 | 1095 |
| 969440 | N/A | N/A | 8366 | 8381 | CTTTATACCAGTGTCT | kk-d9-ekeke | 98 | 1890 |
| 969450 | 2738 | 2753 | 14829 | 14844 | ATGCTAATTTTCTGAC | kk-d9-ekeke | 95 | 1912 |
| 969460 | N/A | N/A | 8166 | 8181 | GGCATTCAGAATTTCC | kk-d9-ekeke | 93 | 1913 |
| 969470 | 969 | 984 | 13060 | 13075 | AGTATTGCCAGCTAAG | kk-d9-kdkdk | 69 | 1479 |
| 969480 | N/A | N/A | 6817 | 6832 | CGCAATGCTGACTTGG | kk-d9-kdkdk | 94 | 1924 |
| 969500 | N/A | N/A | 5450 | 5465 | TGTTATATTTGATCCT | kk-d9-kdkdk | 86 | 1887 |
| 969510 | N/A | N/A | 8333 | 8348 | ACACATCATTGGGTTA | kk-d9-kdkdk | 57 | 426 |
| 971920 | N/A | N/A | 5448 | 5463 | TTATATTTGATCCTCA | kk-d9-kekek | 91 | 1909 |
| 971930 | N/A | N/A | 8320 | 8335 | TTATGAAATTATTGGT | kk-d9-kekek | 82 | 1910 |
| 971940 | 972 | 987 | 13063 | 13078 | GTAAGTATTGCCAGCT | kk-d9-kekek | 53 | 1933 |
| 971950 | N/A | N/A | 6550 | 6565 | ATATCAGATGGGTACT | kk-d9-kekek | 21 | 620 |
| 971960 | N/A | N/A | 8746 | 8761 | TAATTCTATTAGAGGG | kk-d9-kekek | 34 | 220 |
| 971970 | N/A | N/A | 5412 | 5427 | ATTCTCATGGTACAGG | kk-d9-kekek | 76 | 677 |
| 971980 | N/A | N/A | 8321 | 8336 | GTTATGAAATTATTGG | kk-d9-kekek | 83 | 76 |
| 972000 | N/A | N/A | 5450 | 5465 | TGTTATATTTGATCCT | kkk-d8-kdkdk | 66 | 1887 |
| 972010 | N/A | N/A | 8333 | 8348 | ACACATCATTGGGTTA | kkk-d8-kdkdk | 48 | 426 |
| 972020 | 2735 | 2750 | 14826 | 14841 | CTAATTTTCTGACTGT | kkk-d8-kekek | 90 | 1901 |
| 972030 | N/A | N/A | 8163 | 8178 | ATTCAGAATTTCCACT | kkk-d8-kekek | 56 | 1902 |
| 972040 | N/A | N/A | 8832 | 8847 | GAAGCTTTAAACTCAG | kkk-d8-kekek | 47 | 1397 |
| 972050 | N/A | N/A | 5856 | 5871 | GTTTTGTAAGTGCAAC | kkk-d8-kekek | 59 | 1230 |
| 972060 | N/A | N/A | 8368 | 8383 | CACTTTATACCAGTGT | kkk-d8-kekek | 11 | 1908 |
| 972070 | 2340 | 2355 | 14431 | 14446 | GTTCTAACTCTTGGGC | kkk-d8-kekek | 37 | 243 |
| 972080 | N/A | N/A | 8164 | 8179 | CATTCAGAATTTCCAC | kkk-d8-kekek | 65 | 1730 |
| 972090 | 971 | 986 | 13062 | 13077 | TAAGTATTGCCAGCTA | kkk-d9-keke | 78 | 1918 |
| 972100 | N/A | N/A | 6703 | 6718 | TGTATTTCTTGATGTG | kkk-d9-keke | 71 | 1926 |
| 972110 | N/A | N/A | 8830 | 8845 | AGCTTTAAACTCAGGT | kkk-d9-keke | 85 | 1920 |
| 972120 | N/A | N/A | 5449 | 5464 | GTTATATTTGATCCTC | kkk-d9-keke | 98 | 1900 |
| 972130 | N/A | N/A | 8333 | 8348 | ACACATCATTGGGTTA | kkk-d9-keke | 58 | 426 |
| 972140 | N/A | N/A | 5411 | 5426 | TTCTCATGGTACAGGA | kkk-d9-kkke | 44 | 607 |
| 972150 | N/A | N/A | 8236 | 8251 | AGTATTGTTTTTGTGG | kkk-d9-kkke | 89 | 1922 |
| 972160 | N/A | N/A | 8306 | 8321 | GTTCAAAAGCAGCATT | kkk-d9-kkke | 80 | 13 |
| 972170 | N/A | N/A | 6548 | 6563 | ATCAGATGGGTACTTC | kkk-d9-kkke | 88 | 481 |
| 972190 | N/A | N/A | 5855 | 5870 | TTTTGTAAGTGCAACC | kkk-d9-kkke | 98 | 1164 |
| 972200 | N/A | N/A | 8367 | 8382 | ACTTTATACCAGTGTC | kkk-d9-kkke | 58 | 1941 |

TABLE 36
Inhibition of APOL1 mRNA by deoxy, MOE, and cEt gapmers targeting SEQ ID NO: 1 and 2

| | SEQ | SEQ | SEQ | SEQ | | | | |
|---|---|---|---|---|---|---|---|---|
| | ID: 1 | ID: 1 | ID: 2 | ID: 2 | | | % | SEQ |
| Compound | Start | Stop | Start | Stop | | | in- | ID |
| Number | Site | Site | Site | Site | Sequence | Chemistry | hibition | NO |
| 904766 | N/A | N/A | 5858 | 5873 | CAGTTTTGTAAGTGCA | kkk-d10-kkk | 97 | 1577 |
| 905095 | N/A | N/A | 6702 | 6717 | GTATTTCTTGATGTGG | kkk-d10-kkk | 99 | 413 |
| 905491 | N/A | N/A | 8237 | 8252 | GAGTATTGTTTTTGTG | kkk-d10-kkk | 93 | 1899 |
| 969061 | N/A | N/A | 5852 | 5867 | TGTAAGTGCAACCAAT | k-d10-kekek | 81 | 955 |
| 969071 | N/A | N/A | 8741 | 8756 | CTATTAGAGGGCTAGT | k-d10-kekek | 28 | 1674 |
| 969081 | 2340 | 2355 | 14431 | 14446 | GTTCTAACTCTTGGGC | k-d10-kekek | 28 | 243 |
| 969091 | N/A | N/A | 7922 | 7937 | GGAATTATGGAATTGC | k-d10-kekek | 92 | 1249 |
| 969111 | N/A | N/A | 6700 | 6715 | ATTTCTTGATGTGGTG | k-d9-kekeke | 81 | 343 |
| 969131 | N/A | N/A | 5449 | 5464 | GTTATATTTGATCCTC | k-d9-kekeke | 60 | 1900 |
| 969141 | N/A | N/A | 8321 | 8336 | GTTATGAAATTATTGG | k-d9-kekeke | 77 | 76 |
| 969151 | 970 | 985 | 13061 | 13076 | AAGTATTGCCAGCTAA | kek-d9-eekk | 88 | 1911 |
| 969161 | N/A | N/A | 6548 | 6563 | ATCAGATGGGTACTTC | kek-d9-eekk | 91 | 481 |
| 969171 | N/A | N/A | 8744 | 8759 | ATTCTATTAGAGGGCT | kek-d9-eekk | 77 | 1326 |
| 969181 | N/A | N/A | 5449 | 5464 | GTTATATTTGATCCTC | kk-d10-keke | 97 | 1900 |
| 969191 | N/A | N/A | 8332 | 8347 | CACATCATTGGGTTAT | kk-d10-keke | 77 | 356 |
| 969201 | 1033 | 1048 | 13124 | 13139 | GAAGATTGGCTCTGGC | kk-d10-keke | 70 | 1480 |
| 969211 | N/A | N/A | 6818 | 6833 | ACGCAATGCTGACTTG | kk-d10-keke | 89 | 1905 |
| 969221 | N/A | N/A | 8829 | 8844 | GCTTTAAACTCAGGTG | kk-d8-eeeekk | 95 | 81 |
| 969231 | N/A | N/A | 6701 | 6716 | TATTTCTTGATGTGGT | kk-d8-eeeekk | 96 | 1904 |
| 969241 | N/A | N/A | 8828 | 8843 | CTTTAAACTCAGGTGA | kk-d8-eeeekk | 88 | 151 |
| 969251 | N/A | N/A | 5856 | 5871 | GTTTTGTAAGTGCAAC | kk-d8-kekekk | 62 | 1230 |
| 969261 | N/A | N/A | 8742 | 8757 | TCTATTAGAGGGCTAG | kk-d8-kekekk | 25 | 150 |
| 969271 | N/A | N/A | 5853 | 5868 | TTGTAAGTGCAACCAA | kk-d8-kekekk | 54 | 1025 |
| 969281 | N/A | N/A | 8365 | 8380 | TTTATACCAGTGTCTT | kk-d8-kekekk | 51 | 1914 |
| 969291 | 2736 | 2751 | 14827 | 14842 | GCTAATTTTCTGACTG | kk-d8-kekekk | 71 | 1283 |
| 969301 | N/A | N/A | 8237 | 8252 | GAGTATTGTTTTTGTG | kk-d8-kekekk | 85 | 1899 |
| 969311 | 2735 | 2750 | 14826 | 14841 | CTAATTTTCTGACTGT | kk-d9-eeekk | 83 | 1901 |
| 969321 | N/A | N/A | 8163 | 8178 | ATTCAGAATTTCCACT | kk-d9-eeekk | 77 | 1902 |
| 969331 | N/A | N/A | 8830 | 8845 | AGCTTTAAACTCAGGT | kk-d9-eeekk | 93 | 1920 |
| 969341 | N/A | N/A | 5858 | 5873 | CAGTTTTGTAAGTGCA | kk-d9-eeekk | 92 | 1577 |
| 969351 | N/A | N/A | 8744 | 8759 | ATTCTATTAGAGGGCT | kk-d9-eeekk | 70 | 1326 |
| 969361 | N/A | N/A | 5451 | 5466 | GTGTTATATTTGATCC | kk-d9-eeekk | 98 | 1934 |
| 969371 | N/A | N/A | 8334 | 8349 | AACACATCATTGGGTT | kk-d9-eeekk | 43 | 496 |
| 969381 | 2342 | 2357 | 14433 | 14448 | CTGTTCTAACTCTTGG | kk-d9-eeekk | 93 | 383 |
| 969391 | N/A | N/A | 8166 | 8181 | GGCATTCAGAATTTCC | kk-d9-eeekk | 97 | 1913 |
| 969401 | 2735 | 2750 | 14826 | 14841 | CTAATTTTCTGACTGT | kk-d9-ekeke | 90 | 1901 |
| 969411 | N/A | N/A | 8163 | 8178 | ATTCAGAATTTCCACT | kk-d9-ekeke | 87 | 1902 |
| 969421 | N/A | N/A | 8830 | 8845 | AGCTTTAAACTCAGGT | kk-d9-ekeke | 92 | 1920 |
| 969431 | N/A | N/A | 5858 | 5873 | CAGTTTTGTAAGTGCA | kk-d9-ekeke | 91 | 1577 |
| 969441 | N/A | N/A | 8744 | 8759 | ATTCTATTAGAGGGCT | kk-d9-ekeke | 25 | 1326 |
| 969451 | N/A | N/A | 5414 | 5429 | TTATTCTCATGGTACA | kk-d9-ekeke | 51 | 1927 |
| 969461 | N/A | N/A | 8239 | 8254 | GTGAGTATTGTTTTTG | kk-d9-ekeke | 93 | 1928 |
| 969471 | 1032 | 1047 | 13123 | 13138 | AAGATTGGCTCTGGCT | kk-d9-kdkdk | 65 | 1411 |
| 969481 | N/A | N/A | 7921 | 7936 | GAATTATGGAATTGCA | kk-d9-kdkdk | 82 | 1183 |
| 969501 | N/A | N/A | 5854 | 5869 | TTTGTAAGTGCAACCA | kk-d9-kdkdk | 99 | 1095 |
| 969511 | N/A | N/A | 8366 | 8381 | CTTTATACCAGTGTCT | kk-d9-kdkdk | 92 | 1890 |
| 971921 | N/A | N/A | 5449 | 5464 | GTTATATTTGATCCTC | kk-d9-kekek | 80 | 1900 |
| 971931 | N/A | N/A | 8332 | 8347 | CACATCATTGGGTTAT | kk-d9-kekek | 74 | 356 |
| 971941 | 1035 | 1050 | 13126 | 13141 | CTGAAGATTGGCTCTG | kk-d9-kekek | 45 | 1939 |
| 971951 | N/A | N/A | 6704 | 6719 | GTGTATTTCTTGATGT | kk-d9-kekek | 95 | 1940 |
| 971961 | N/A | N/A | 8831 | 8846 | AAGCTTTAAACTCAGG | kk-d9-kekek | 48 | 1327 |
| 971971 | N/A | N/A | 5450 | 5465 | TGTTATATTTGATCCT | kk-d9-kekek | 81 | 1887 |
| 971981 | N/A | N/A | 8333 | 8348 | ACACATCATTGGGTTA | kk-d9-kekek | 50 | 426 |
| 971991 | N/A | N/A | 8830 | 8845 | AGCTTTAAACTCAGGT | kkk-d8-kdkdk | 74 | 1920 |
| 972001 | N/A | N/A | 5854 | 5869 | TTTGTAAGTGCAACCA | kkk-d8-kdkdk | 71 | 1095 |
| 972011 | N/A | N/A | 8366 | 8381 | CTTTATACCAGTGTCT | kkk-d8-kdkdk | 87 | 1890 |
| 972021 | N/A | N/A | 5411 | 5426 | TTCTCATGGTACAGGA | kkk-d8-kekek | 54 | 607 |
| 972031 | N/A | N/A | 8236 | 8251 | AGTATTGTTTTTGTGG | kkk-d8-kekek | 55 | 1922 |
| 972041 | N/A | N/A | 8308 | 8323 | TGGTTCAAAAGCAGCA | kkk-d8-kekek | 57 | 1048 |
| 972051 | N/A | N/A | 5860 | 5875 | GGCAGTTTTGTAAGTG | kkk-d8-kekek | 32 | 123 |
| 972061 | N/A | N/A | 8745 | 8760 | AATTCTATTAGAGGGC | kkk-d8-kekek | 41 | 1396 |
| 972071 | 2736 | 2751 | 14827 | 14842 | GCTAATTTTCTGACTG | kkk-d8-kekek | 88 | 1283 |
| 972081 | N/A | N/A | 8237 | 8252 | GAGTATTGTTTTTGTG | kkk-d8-kekek | 56 | 1899 |
| 972091 | 1034 | 1049 | 13125 | 13140 | TGAAGATTGGCTCTGG | kkk-d9-keke | 54 | 1931 |
| 972101 | N/A | N/A | 6819 | 6834 | AACGCAATGCTGACTT | kkk-d9-keke | 83 | 1919 |
| 972121 | N/A | N/A | 5854 | 5869 | TTTGTAAGTGCAACCA | kkk-d9-keke | 49 | 1095 |
| 972131 | N/A | N/A | 8366 | 8381 | CTTTATACCAGTGTCT | kkk-d9-keke | 94 | 1890 |
| 972141 | N/A | N/A | 5448 | 5463 | TTATATTTGATCCTCA | kkk-d9-kkke | 96 | 1909 |
| 972151 | N/A | N/A | 8320 | 8335 | TTATGAAATTATTGGT | kkk-d9-kkke | 85 | 1910 |
| 972161 | 970 | 985 | 13061 | 13076 | AAGTATTGCCAGCTAA | kkk-d9-kkke | 49 | 1911 |
| 972171 | N/A | N/A | 6702 | 6717 | GTATTTCTTGATGTGG | kkk-d9-kkke | 98 | 413 |
| 972191 | N/A | N/A | 5859 | 5874 | GCAGTTTTGTAAGTGC | kkk-d9-kkke | 76 | 1647 |
| 972201 | N/A | N/A | 8745 | 8760 | AATTCTATTAGAGGGC | kkk-d9-kkke | 70 | 1396 |

TABLE 37
Inhibition of APOL1 mRNA by deoxy, MOE, and cEt gapmers targeting SEQ ID NO: 1 and 2

| | SEQ | SEQ | SEQ | SEQ | | | | |
|---|---|---|---|---|---|---|---|---|
| | ID: 1 | ID: 1 | ID: 2 | ID: 2 | | | | SEQ |
| Compound | Start | Stop | Start | Stop | | | % | ID |
| Number | Site | Site | Site | Site | Sequence | Chemistry | inhibition | NO |
| 905095 | N/A | N/A | 6702 | 6717 | GTATTTCTTGATGTGG | kkk-d10-kkk | 100 | 413 |
| 905139 | N/A | N/A | 6818 | 6833 | ACGCAATGCTGACTTG | kkk-d10-kkk | 94 | 1905 |
| 905491 | N/A | N/A | 8237 | 8252 | GAGTATTGTTTTTGTG | kkk-d10-kkk | 94 | 1899 |
| 969062 | N/A | N/A | 5856 | 5871 | GTTTTGTAAGTGCAAC | k-d10-kekek | 92 | 1230 |
| 969072 | N/A | N/A | 8742 | 8757 | TCTATTAGAGGGCTAG | k-d10-kekek | 42 | 150 |
| 969082 | 2736 | 2751 | 14827 | 14842 | GCTAATTTTCTGACTG | k-d10-kekek | 98 | 1283 |
| 969092 | N/A | N/A | 8164 | 8179 | CATTCAGAATTTCCAC | k-d10-kekek | 67 | 1730 |
| 969102 | N/A | N/A | 8828 | 8843 | CTTTAAACTCAGGTGA | k-d9-kekeke | 70 | 151 |
| 969112 | N/A | N/A | 6816 | 6831 | GCAATGCTGACTTGGC | k-d9-kekeke | 45 | 1903 |
| 969132 | N/A | N/A | 5450 | 5465 | TGTTATATTTGATCCT | k-d9-kekeke | 51 | 1887 |
| 969142 | N/A | N/A | 8333 | 8348 | ACACATCATTGGGTTA | k-d9-kekeke | 36 | 426 |
| 969152 | 1033 | 1048 | 13124 | 13139 | GAAGATTGGCTCTGGC | kek-d9-eekk | 87 | 1480 |
| 969162 | N/A | N/A | 6702 | 6717 | GTATTTCTTGATGTGG | kek-d9-eekk | 99 | 413 |
| 969172 | N/A | N/A | 8829 | 8844 | GCTTTAAACTCAGGTG | kek-d9-eekk | 93 | 81 |
| 969182 | N/A | N/A | 5853 | 5868 | TTGTAAGTGCAACCAA | kk-d10-keke | 81 | 1025 |
| 969192 | N/A | N/A | 8365 | 8380 | TTTATACCAGTGTCTT | kk-d10-keke | 84 | 1914 |
| 969202 | 2251 | 2266 | 14342 | 14357 | CGTCAATATATTCTTT | kk-d10-keke | 87 | 1925 |
| 969212 | N/A | N/A | 7922 | 7937 | GGAATTATGGAATTGC | kk-d10-keke | 40 | 1249 |
| 969222 | 969 | 984 | 13060 | 13075 | AGTATTGCCAGCTAAG | kk-d8-eeeekk | 59 | 1479 |
| 969232 | N/A | N/A | 6817 | 6832 | CGCAATGCTGACTTGG | kk-d8-eeeekk | 68 | 1924 |
| 969252 | N/A | N/A | 6546 | 6561 | CAGATGGGTACTTCTG | kk-d8-kekekk | 10 | 341 |
| 969262 | N/A | N/A | 8827 | 8842 | TTTAAACTCAGGTGAC | kk-d8-kekekk | 16 | 1675 |
| 969272 | N/A | N/A | 5857 | 5872 | AGTTTTGTAAGTGCAA | kk-d8-kekekk | 84 | 1917 |
| 969282 | N/A | N/A | 8743 | 8758 | TTCTATTAGAGGGCTA | kk-d8-kekekk | 26 | 80 |
| 969292 | N/A | N/A | 5412 | 5427 | ATTCTCATGGTACAGG | kk-d8-kekekk | 34 | 677 |
| 969302 | N/A | N/A | 8321 | 8336 | GTTATGAAATTATTGG | kk-d8-kekekk | 86 | 76 |
| 969312 | N/A | N/A | 5411 | 5426 | TTCTCATGGTACAGGA | kk-d9-eeekk | 86 | 607 |
| 969322 | N/A | N/A | 8236 | 8251 | AGTATTGTTTTTGTGG | kk-d9-eeekk | 90 | 1922 |
| 969332 | N/A | N/A | 8306 | 8321 | GTTCAAAAGCAGCATT | kk-d9-eeekk | 86 | 13 |
| 969342 | N/A | N/A | 6548 | 6563 | ATCAGATGGGTACTTC | kk-d9-eeekk | 67 | 481 |
| 969362 | N/A | N/A | 5855 | 5870 | TTTTGTAAGTGCAACC | kk-d9-eeekk | 99 | 1164 |
| 969372 | N/A | N/A | 8367 | 8382 | ACTTTATACCAGTGTC | kk-d9-eeekk | 91 | 1941 |
| 969382 | 2738 | 2753 | 14829 | 14844 | ATGCTAATTTTCTGAC | kk-d9-eeekk | 88 | 1912 |
| 969392 | N/A | N/A | 8239 | 8254 | GTGAGTATTGTTTTTG | kk-d9-eeekk | 92 | 1928 |
| 969402 | N/A | N/A | 5411 | 5426 | TTCTCATGGTACAGGA | kk-d9-ekeke | 79 | 607 |
| 969412 | N/A | N/A | 8236 | 8251 | AGTATTGTTTTTGTGG | kk-d9-ekeke | 89 | 1922 |
| 969422 | N/A | N/A | 8306 | 8321 | GTTCAAAAGCAGCATT | kk-d9-ekeke | 82 | 13 |
| 969432 | N/A | N/A | 6548 | 6563 | ATCAGATGGGTACTTC | kk-d9-ekeke | 73 | 481 |
| 969452 | N/A | N/A | 5451 | 5466 | GTGTTATATTTGATCC | kk-d9-ekeke | 96 | 1934 |
| 969462 | N/A | N/A | 8323 | 8338 | GGGTTATGAAATTATT | kk-d9-ekeke | 88 | 1935 |
| 969472 | 2735 | 2750 | 14826 | 14841 | CTAATTTTCTGACTGT | kk-d9-kdkdk | 84 | 1901 |
| 969482 | N/A | N/A | 8163 | 8178 | ATTCAGAATTTCCACT | kk-d9-kdkdk | 79 | 1902 |
| 969492 | N/A | N/A | 8830 | 8845 | AGCTTTAAACTCAGGT | kk-d9-kdkdk | 86 | 1920 |
| 969502 | N/A | N/A | 5858 | 5873 | CAGTTTTGTAAGTGCA | kk-d9-kdkdk | 95 | 1577 |
| 969512 | N/A | N/A | 8744 | 8759 | ATTCTATTAGAGGGCT | kk-d9-kdkdk | 74 | 1326 |
| 971922 | N/A | N/A | 5853 | 5868 | TTGTAAGTGCAACCAA | kk-d9-kekek | 69 | 1025 |
| 971932 | N/A | N/A | 8365 | 8380 | TTTATACCAGTGTCTT | kk-d9-kekek | 89 | 1914 |
| 971942 | 2253 | 2268 | 14344 | 14359 | TCCGTCAATATATTCT | kk-d9-kekek | 94 | 1897 |
| 971952 | N/A | N/A | 6820 | 6835 | GAACGCAATGCTGACT | kk-d9-kekek | 78 | 1888 |
| 971972 | N/A | N/A | 5854 | 5869 | TTTGTAAGTGCAACCA | kk-d9-kekek | 98 | 1095 |
| 971982 | N/A | N/A | 8366 | 8381 | CTTTATACCAGTGTCT | kk-d9-kekek | 86 | 1890 |
| 971992 | N/A | N/A | 8306 | 8321 | GTTCAAAAGCAGCATT | kkk-d8-kdkdk | 23 | 13 |
| 972002 | N/A | N/A | 5858 | 5873 | CAGTTTTGTAAGTGCA | kkk-d8-kdkdk | 93 | 1577 |
| 972012 | N/A | N/A | 8743 | 8758 | TTCTATTAGAGGGCTA | kkk-d8-kdkdk | 78 | 80 |
| 972022 | N/A | N/A | 5448 | 5463 | TTATATTTGATCCTCA | kkk-d8-kekek | 92 | 1909 |
| 972032 | N/A | N/A | 8320 | 8335 | TTATGAAATTATTGGT | kkk-d8-kekek | 86 | 1910 |
| 972042 | 972 | 987 | 13063 | 13078 | GTAAGTATTGCCAGCT | kkk-d8-kekek | 73 | 1933 |
| 972052 | N/A | N/A | 6550 | 6565 | ATATCAGATGGGTACT | kkk-d8-kekek | 28 | 620 |
| 972062 | N/A | N/A | 8746 | 8761 | TAATTCTATTAGAGGG | kkk-d8-kekek | 41 | 220 |
| 972072 | N/A | N/A | 5412 | 5427 | ATTCTCATGGTACAGG | kkk-d8-kekek | 70 | 677 |
| 972082 | N/A | N/A | 8321 | 8336 | GTTATGAAATTATTGG | kkk-d8-kekek | 79 | 76 |
| 972092 | 2252 | 2267 | 14343 | 14358 | CCGTCAATATATTCTT | kkk-d9-keke | 97 | 1936 |
| 972102 | N/A | N/A | 7923 | 7938 | GGGAATTATGGAATTG | kkk-d9-keke | 63 | 1596 |
| 972122 | N/A | N/A | 5858 | 5873 | CAGTTTTGTAAGTGCA | kkk-d9-keke | 92 | 1577 |
| 972132 | N/A | N/A | 8743 | 8758 | TTCTATTAGAGGGCTA | kkk-d9-keke | 91 | 80 |
| 972142 | N/A | N/A | 5449 | 5464 | GTTATATTTGATCCTC | kkk-d9-kkke | 98 | 1900 |
| 972152 | N/A | N/A | 8332 | 8347 | CACATCATTGGGTTAT | kkk-d9-kkke | 78 | 356 |
| 972162 | 1033 | 1048 | 13124 | 13139 | GAAGATTGGCTCTGGC | kkk-d9-kkke | 70 | 1480 |
| 972172 | N/A | N/A | 6818 | 6833 | ACGCAATGCTGACTTG | kkk-d9-kkke | 88 | 1905 |
| 972182 | N/A | N/A | 8831 | 8846 | AAGCTTTAAACTCAGG | kkk-d9-kkke | 72 | 1327 |
| 972192 | N/A | N/A | 6549 | 6564 | TATCAGATGGGTACTT | kkk-d9-kkke | 69 | 550 |

TABLE 38
Inhibition of APOL1 mRNA by deoxy, MOE, and cEt gapmers targeting SEQ ID NO: 1 and 2

| | SEQ | SEQ | SEQ | SEQ | | | | |
|---|---|---|---|---|---|---|---|---|
| | ID: 1 | ID: 1 | ID: 2 | ID: 2 | | | | SEQ |
| Compound | Start | Stop | Start | Stop | | | % | ID |
| Number | Site | Site | Site | Site | Sequence | Chemistry | inhibition | NO |
| 905095 | N/A | N/A | 6702 | 6717 | GTATTTCTTGATGTGG | kkk-d10-kkk | 99 | 413 |
| 905469 | N/A | N/A | 8164 | 8179 | CATTCAGAATTTCCAC | kkk-d10-kkk | 94 | 1730 |
| 905491 | N/A | N/A | 8237 | 8252 | GAGTATTGTTTTTGTG | kkk-d10-kkk | 93 | 1899 |
| 969063 | N/A | N/A | 6546 | 6561 | CAGATGGGTACTTCTG | k-d10-kekek | 44 | 341 |
| 969073 | N/A | N/A | 8827 | 8842 | TTTAAACTCAGGTGAC | k-d10-kekek | 45 | 1675 |
| 969083 | N/A | N/A | 5412 | 5427 | ATTCTCATGGTACAGG | k-d10-kekek | 83 | 677 |
| 969093 | N/A | N/A | 8237 | 8252 | GAGTATTGTTTTTGTG | k-d10-kekek | 90 | 1899 |
| 969103 | 968 | 983 | 13059 | 13074 | GTATTGCCAGCTAAGG | k-d9-kekeke | 70 | 1410 |
| 969113 | N/A | N/A | 7920 | 7935 | AATTATGGAATTGCAG | k-d9-kekeke | 55 | 1923 |
| 969123 | N/A | N/A | 8830 | 8845 | AGCTTTAAACTCAGGT | k-d9-kekeke | 52 | 1920 |
| 969133 | N/A | N/A | 5854 | 5869 | TTTGTAAGTGCAACCA | k-d9-kekeke | 95 | 1095 |
| 969143 | N/A | N/A | 8366 | 8381 | CTTTATACCAGTGTCT | k-d9-kekeke | 92 | 1890 |
| 969153 | 2251 | 2266 | 14342 | 14357 | CGTCAATATATTCTTT | kek-d9-eekk | 93 | 1925 |
| 969163 | N/A | N/A | 6818 | 6833 | ACGCAATGCTGACTTG | kek-d9-eekk | 91 | 1905 |
| 969183 | N/A | N/A | 5857 | 5872 | AGTTTTGTAAGTGCAA | kk-d10-keke | 92 | 1917 |
| 969193 | N/A | N/A | 8742 | 8757 | TCTATTAGAGGGCTAG | kk-d10-keke | 72 | 150 |
| 969203 | 2340 | 2355 | 14431 | 14446 | GTTCTAACTCTTGGGC | kk-d10-keke | 84 | 243 |
| 969213 | N/A | N/A | 8164 | 8179 | CATTCAGAATTTCCAC | kk-d10-keke | 84 | 1730 |
| 969223 | 1032 | 1047 | 13123 | 13138 | AAGATTGGCTCTGGCT | kk-d8-eeeekk | 55 | 1411 |
| 969233 | N/A | N/A | 7921 | 7936 | GAATTATGGAATTGCA | kk-d8-eeeekk | 95 | 1183 |
| 969253 | N/A | N/A | 6700 | 6715 | ATTTCTTGATGTGGTG | kk-d8-kekekk | 69 | 343 |
| 969273 | N/A | N/A | 6547 | 6562 | TCAGATGGGTACTTCT | kk-d8-kekekk | 62 | 411 |
| 969293 | N/A | N/A | 5450 | 5465 | TGTTATATTTGATCCT | kk-d8-kekekk | 46 | 1887 |
| 969303 | N/A | N/A | 8333 | 8348 | ACACATCATTGGGTTA | kk-d8-kekekk | 20 | 426 |
| 969313 | N/A | N/A | 5448 | 5463 | TTATATTTGATCCTCA | kk-d9-eeekk | 96 | 1909 |
| 969323 | N/A | N/A | 8320 | 8335 | TTATGAAATTATTGGT | kk-d9-eeekk | 39 | 1910 |
| 969333 | 970 | 985 | 13061 | 13076 | AAGTATTGCCAGCTAA | kk-d9-eeekk | 63 | 1911 |
| 969343 | N/A | N/A | 6702 | 6717 | GTATTTCTTGATGTGG | kk-d9-eeekk | 97 | 413 |
| 969363 | N/A | N/A | 5859 | 5874 | GCAGTTTTGTAAGTGC | kk-d9-eeekk | 79 | 1647 |
| 969373 | N/A | N/A | 8745 | 8760 | AATTCTATTAGAGGGC | kk-d9-eeekk | 73 | 1396 |
| 969383 | N/A | N/A | 5414 | 5429 | TTATTCTCATGGTACA | kk-d9-eeekk | 48 | 1927 |
| 969393 | N/A | N/A | 8323 | 8338 | GGGTTATGAAATTATT | kk-d9-eeekk | 77 | 1935 |
| 969403 | N/A | N/A | 5448 | 5463 | TTATATTTGATCCTCA | kk-d9-ekeke | 96 | 1909 |
| 969413 | N/A | N/A | 8320 | 8335 | TTATGAAATTATTGGT | kk-d9-ekeke | 74 | 1910 |
| 969423 | 970 | 985 | 13061 | 13076 | AAGTATTGCCAGCTAA | kk-d9-ekeke | 49 | 1911 |
| 969433 | N/A | N/A | 6702 | 6717 | GTATTTCTTGATGTGG | kk-d9-ekeke | 96 | 413 |
| 969453 | N/A | N/A | 5452 | 5467 | CGTGTTATATTTGATC | kk-d9-ekeke | 76 | 1906 |
| 969463 | N/A | N/A | 8335 | 8350 | CAACACATCATTGGGT | kk-d9-ekeke | 80 | 1907 |
| 969473 | N/A | N/A | 5411 | 5426 | TTCTCATGGTACAGGA | kk-d9-kdkdk | 89 | 607 |
| 969483 | N/A | N/A | 8236 | 8251 | AGTATTGTTTTTGTGG | kk-d9-kdkdk | 72 | 1922 |
| 969493 | N/A | N/A | 8306 | 8321 | GTTCAAAAGCAGCATT | kk-d9-kdkdk | 73 | 13 |
| 969503 | N/A | N/A | 6548 | 6563 | ATCAGATGGGTACTTC | kk-d9-kdkdk | 78 | 481 |
| 971923 | N/A | N/A | 5857 | 5872 | AGTTTTGTAAGTGCAA | kk-d9-kekek | 81 | 1917 |
| 971933 | N/A | N/A | 8742 | 8757 | TCTATTAGAGGGCTAG | kk-d9-kekek | 52 | 150 |
| 971943 | 2342 | 2357 | 14433 | 14448 | CTGTTCTAACTCTTGG | kk-d9-kekek | 88 | 383 |
| 971953 | N/A | N/A | 7924 | 7939 | TGGGAATTATGGAATT | kk-d9-kekek | 87 | 1929 |
| 971963 | N/A | N/A | 8830 | 8845 | AGCTTTAAACTCAGGT | kk-d9-kekek | 87 | 1920 |
| 971973 | N/A | N/A | 5858 | 5873 | CAGTTTTGTAAGTGCA | kk-d9-kekek | 91 | 1577 |
| 971983 | N/A | N/A | 8744 | 8759 | ATTCTATTAGAGGGCT | kk-d9-kekek | 46 | 1326 |
| 971993 | 970 | 985 | 13061 | 13076 | AAGTATTGCCAGCTAA | kkk-d8-kdkdk | 54 | 1911 |
| 972003 | N/A | N/A | 6548 | 6563 | ATCAGATGGGTACTTC | kkk-d8-kdkdk | 79 | 481 |
| 972013 | N/A | N/A | 8744 | 8759 | ATTCTATTAGAGGGCT | kkk-d8-kdkdk | 78 | 1326 |
| 972023 | N/A | N/A | 5449 | 5464 | GTTATATTTGATCCTC | kkk-d8-kekek | 66 | 1900 |
| 972033 | N/A | N/A | 8332 | 8347 | CACATCATTGGGTTAT | kkk-d8-kekek | 58 | 356 |
| 972043 | 1035 | 1050 | 13126 | 13141 | CTGAAGATTGGCTCTG | kkk-d8-kekek | 36 | 1939 |
| 972053 | N/A | N/A | 6704 | 6719 | GTGTATTTCTTGATGT | kkk-d8-kekek | 84 | 1940 |
| 972063 | N/A | N/A | 8831 | 8846 | AAGCTTTAAACTCAGG | kkk-d8-kekek | 16 | 1327 |
| 972073 | N/A | N/A | 5450 | 5465 | TGTTATATTTGATCCT | kkk-d8-kekek | 59 | 1887 |
| 972083 | N/A | N/A | 8333 | 8348 | ACACATCATTGGGTTA | kkk-d8-kekek | 32 | 426 |
| 972093 | 2341 | 2356 | 14432 | 14447 | TGTTCTAACTCTTGGG | kkk-d9-keke | 88 | 313 |
| 972103 | N/A | N/A | 8165 | 8180 | GCATTCAGAATTTCCA | kkk-d9-keke | 84 | 1937 |
| 972113 | N/A | N/A | 8306 | 8321 | GTTCAAAAGCAGCATT | kkk-d9-keke | 85 | 13 |
| 972123 | N/A | N/A | 6548 | 6563 | ATCAGATGGGTACTTC | kkk-d9-keke | 85 | 481 |
| 972133 | N/A | N/A | 8829 | 8844 | GCTTTAAACTCAGGTG | kkk-d9-keke | 82 | 81 |
| 972143 | N/A | N/A | 5853 | 5868 | TTGTAAGTGCAACCAA | kkk-d9-kkke | 78 | 1025 |
| 972153 | N/A | N/A | 8365 | 8380 | TTTATACCAGTGTCTT | kkk-d9-kkke | 80 | 1914 |
| 972163 | 2251 | 2266 | 14342 | 14357 | CGTCAATATATTCTTT | kkk-d9-kkke | 95 | 1925 |
| 972173 | N/A | N/A | 7922 | 7937 | GGAATTATGGAATTGC | kkk-d9-kkke | 65 | 1249 |
| 972183 | N/A | N/A | 8307 | 8322 | GGTTCAAAAGCAGCAT | kkk-d9-kkke | 74 | 978 |
| 972193 | N/A | N/A | 6703 | 6718 | TGTATTTCTTGATGTG | kkk-d9-kkke | 87 | 1926 |

### Example 2: Dose-Dependent Antisense Inhibition of Human APOL1 in A431 Cells

[0338] Gapmers from Example 1 exhibiting significant in vitro inhibition of APOL1 mRNA were selected and tested at various doses in A431 cells. The antisense oligonucleotides were tested in a series of experiments that had similar culture conditions. The results for each experiment are presented in separate tables shown below.

[0339] Cells were plated at a density of 10,000 cells per well and transfected free uptake with various concentrations of 3-10-3 cEt gapmers, as specified in the Tables below. After a treatment period of approximately 16 hours, RNA was isolated from the cells and APOL1 mRNA levels were measured by quantitative real-time PCR. Human primer probe set RTS35962 was used to measure mRNA levels. APOL1 mRNA levels were adjusted according to total RNA content, as measured by RIBOGREEN®. Results are presented as percent inhibition of APOL1, relative to untreated control cells.

[0340] The half maximal inhibitory concentration (IC₅₀) of each oligonucleotide is also presented. APOL1 mRNA levels were significantly reduced in a dose-dependent manner in antisense oligonucleotide treated cells.

TABLE 39
Multi-dose assay with 3-10-3 cEt gapmers

| | % inhibition | | | | |
|---|---|---|---|---|---|
| Compound | 62.5 | 250 | 1,000 | 4,000 | IC₅₀ |
| Number | nM | nM | nM | nM | (μm) |
| 793406 | 19 | 60 | 83 | 93 | 0.2 |
| 903830 | 54 | 85 | 95 | 97 | <0.1 |
| 903862 | 49 | 69 | 88 | 93 | <0.1 |
| 903894 | 41 | 67 | 87 | 94 | 0.1 |
| 904119 | 49 | 70 | 82 | 85 | <0.1 |
| 904758 | 36 | 63 | 83 | 92 | 0.1 |
| 904760 | 75 | 93 | 99 | 99 | <0.1 |
| 904823 | 50 | 74 | 85 | 91 | <0.1 |
| 905142 | 32 | 74 | 90 | 95 | 0.1 |
| 905143 | 52 | 76 | 92 | 97 | <0.1 |
| 905270 | 44 | 78 | 90 | 94 | <0.1 |
| 905271 | 44 | 66 | 86 | 91 | 0.1 |
| 905398 | 59 | 82 | 94 | 96 | <0.1 |
| 905462 | 42 | 73 | 90 | 95 | 0.1 |
| 905463 | 42 | 67 | 85 | 94 | 0.1 |
| 905494 | 51 | 73 | 84 | 91 | <0.1 |
| 905654 | 57 | 74 | 92 | 94 | <0.1 |
| 905655 | 61 | 80 | 90 | 94 | <0.1 |

TABLE 40
Multi-dose assay with 3-10-3 cEt gapmers

| | % inhibition | | | | |
|---|---|---|---|---|---|
| Compound | 62.5 | 250 | 1,000 | 4,000 | IC₅₀ |
| Number | nM | nM | nM | nM | (μm) |
| 793406 | 15 | 58 | 82 | 88 | 0.3 |
| 903544 | 46 | 72 | 87 | 92 | <0.1 |
| 904026 | 62 | 88 | 96 | 98 | <0.1 |
| 904058 | 62 | 83 | 94 | 98 | <0.1 |
| 904121 | 50 | 78 | 86 | 90 | <0.1 |
| 904216 | 32 | 64 | 78 | 82 | 0.2 |
| 904761 | 19 | 46 | 78 | 92 | 0.3 |
| 905114 | 36 | 73 | 88 | 91 | 0.1 |
| 905144 | 35 | 50 | 75 | 82 | 0.2 |
| 905146 | 42 | 71 | 87 | 97 | 0.1 |
| 905401 | 52 | 79 | 89 | 94 | <0.1 |
| 905402 | 57 | 82 | 94 | 96 | <0.1 |
| 905496 | 29 | 68 | 90 | 93 | 0.1 |
| 905497 | 78 | 91 | 95 | 96 | <0.1 |
| 905498 | 60 | 84 | 94 | 94 | <0.1 |
| 905657 | 47 | 67 | 84 | 93 | 0.1 |
| 905688 | 25 | 71 | 86 | 92 | 0.2 |
| 905689 | 68 | 87 | 93 | 94 | <0.1 |
| 905690 | 57 | 78 | 88 | 92 | <0.1 |

TABLE 41
Multi-dose assay with 3-10-3 cEt gapmers

| | % inhibition | | | | |
|---|---|---|---|---|---|
| Compound | 62.5 | 250 | 1,000 | 4,000 | IC₅₀ |
| Number | nM | nM | nM | nM | (μm) |
| 793406 | 10 | 57 | 83 | 92 | 0.3 |
| 903644 | 35 | 72 | 85 | 92 | 0.1 |
| 903996 | 50 | 79 | 88 | 97 | <0.1 |
| 904027 | 28 | 61 | 81 | 88 | 0.2 |
| 904443 | 54 | 84 | 96 | 98 | <0.1 |
| 904444 | 74 | 91 | 96 | 98 | <0.1 |
| 904763 | 70 | 91 | 97 | 98 | <0.1 |
| 904764 | 47 | 84 | 95 | 99 | <0.1 |
| 904828 | 79 | 92 | 97 | 97 | <0.1 |
| 905020 | 46 | 73 | 90 | 95 | <0.1 |
| 905147 | 37 | 71 | 87 | 93 | 0.1 |
| 905148 | 22 | 60 | 83 | 94 | 0.2 |
| 905276 | 29 | 63 | 83 | 92 | 0.2 |
| 905370 | 8 | 46 | 74 | 84 | 0.4 |
| 905371 | 38 | 67 | 86 | 94 | 0.1 |
| 905372 | 59 | 82 | 92 | 95 | <0.1 |
| 905468 | 40 | 67 | 87 | 94 | 0.1 |
| 905499 | 72 | 87 | 92 | 93 | <0.1 |
| 905691 | 53 | 77 | 85 | 92 | <0.1 |

TABLE 42
Multi-dose assay with 3-10-3 cEt gapmers

| | % inhibition | | | | |
|---|---|---|---|---|---|
| Compound | 62.5 | 250 | 1,000 | 4,000 | IC₅₀ |
| Number | nM | nM | nM | nM | (μm) |
| 793406 | 12 | 56 | 81 | 92 | 0.3 |
| 903613 | 47 | 68 | 81 | 88 | <0.1 |
| 903805 | 28 | 58 | 75 | 82 | 0.2 |
| 903998 | 56 | 86 | 93 | 96 | <0.1 |
| 904029 | 34 | 58 | 79 | 88 | 0.2 |
| 904030 | 45 | 78 | 92 | 96 | <0.1 |
| 904253 | 46 | 74 | 85 | 92 | <0.1 |
| 904766 | 96 | 98 | 99 | 99 | <0.1 |
| 904829 | 41 | 75 | 84 | 89 | 0.1 |
| 905021 | 38 | 73 | 90 | 95 | 0.1 |
| 905022 | 47 | 76 | 92 | 97 | <0.1 |
| 905149 | 38 | 65 | 85 | 93 | 0.1 |
| 905277 | 24 | 50 | 80 | 92 | 0.3 |
| 905373 | 74 | 93 | 98 | 99 | <0.1 |
| 905404 | 27 | 58 | 77 | 88 | 0.2 |
| 905501 | 29 | 67 | 86 | 92 | 0.1 |
| 905565 | 20 | 49 | 73 | 89 | 0.3 |
| 905757 | 18 | 56 | 78 | 86 | 0.3 |
| 905758 | 26 | 65 | 85 | 92 | 0.2 |

TABLE 43
Multi-dose assay with 3-10-3 cEt gapmers

| | % inhibition | | | | |
|---|---|---|---|---|---|
| Compound | 62.5 | 250 | 1,000 | 4,000 | IC₅₀ |
| Number | nM | nM | nM | nM | (μm) |
| 793406 | 36 | 64 | 85 | 94 | 0.1 |
| 903807 | 46 | 78 | 90 | 95 | <0.1 |
| 903872 | 38 | 72 | 88 | 94 | 0.1 |
| 903999 | 32 | 66 | 83 | 91 | 0.1 |
| 904000 | 90 | 98 | 99 | 100 | <0.1 |
| 904001 | 95 | 99 | 100 | 100 | <0.1 |
| 904063 | 24 | 65 | 81 | 89 | 0.2 |
| 904223 | 47 | 75 | 84 | 89 | <0.1 |
| 904224 | 60 | 86 | 91 | 94 | <0.1 |
| 904254 | 35 | 62 | 82 | 86 | 0.1 |
| 904862 | 9 | 49 | 64 | 89 | 0.4 |
| 905086 | 28 | 55 | 80 | 89 | 0.2 |
| 905120 | 70 | 90 | 97 | 98 | <0.1 |
| 905374 | 48 | 70 | 80 | 88 | <0.1 |
| 905407 | 38 | 67 | 86 | 93 | 0.1 |
| 905408 | 23 | 61 | 83 | 92 | 0.2 |
| 905471 | 59 | 82 | 86 | 86 | <0.1 |
| 905600 | 52 | 81 | 94 | 98 | <0.1 |
| 905631 | 32 | 52 | 71 | 83 | 0.2 |

TABLE 44
Multi-dose assay with 3-10-3 cEt gapmers

| | % inhibition | | | | |
|---|---|---|---|---|---|
| Compound | 62.5 | 250 | 1,000 | 4,000 | IC₅₀ |
| Number | nM | nM | nM | nM | (μm) |
| 793406 | 17 | 59 | 83 | 91 | 0.2 |
| 903874 | 44 | 70 | 87 | 95 | 0.1 |
| 903939 | 64 | 87 | 94 | 97 | <0.1 |
| 904002 | 53 | 82 | 92 | 97 | <0.1 |
| 904003 | 47 | 76 | 90 | 96 | <0.1 |
| 904034 | 41 | 70 | 88 | 94 | 0.1 |
| 904226 | 77 | 95 | 98 | 99 | <0.1 |
| 904675 | 80 | 95 | 99 | 99 | <0.1 |
| 905121 | 64 | 87 | 93 | 95 | <0.1 |
| 905123 | 62 | 85 | 92 | 95 | <0.1 |
| 905473 | 47 | 61 | 65 | 61 | <0.1 |
| 905475 | 43 | 71 | 90 | 96 | 0.1 |
| 905505 | 58 | 87 | 95 | 97 | <0.1 |
| 905601 | 49 | 79 | 92 | 96 | <0.1 |
| 905633 | 51 | 81 | 92 | 94 | <0.1 |
| 905634 | 54 | 82 | 91 | 96 | <0.1 |
| 905665 | 30 | 76 | 91 | 94 | 0.1 |
| 905697 | 51 | 78 | 92 | 96 | <0.1 |
| 905698 | 85 | 97 | 99 | 99 | <0.1 |

TABLE 45
Multi-dose assay with 3-10-3 cEt gapmers

| | % inhibition | | | | |
|---|---|---|---|---|---|
| Compound | 62.5 | 250 | 1,000 | 4,000 | IC₅₀ |
| Number | nM | nM | nM | nM | (μm) |
| 793406 | 73 | 85 | 92 | 95 | <0.1 |
| 903940 | 64 | 83 | 92 | 96 | <0.1 |
| 904101 | 74 | 85 | 92 | 94 | <0.1 |
| 904102 | 75 | 88 | 94 | 96 | <0.1 |
| 904420 | 22 | 40 | 58 | 62 | 0.8 |
| 904452 | 78 | 88 | 93 | 96 | <0.1 |
| 904484 | 76 | 87 | 92 | 96 | <0.1 |
| 904515 | 43 | 72 | 85 | 91 | 0.1 |
| 904517 | 78 | 89 | 92 | 93 | <0.1 |
| 905028 | 63 | 82 | 90 | 93 | <0.1 |
| 905029 | 85 | 88 | 93 | 96 | <0.1 |
| 905093 | 58 | 82 | 91 | 95 | <0.1 |
| 905094 | 95 | 99 | 99 | 99 | <0.1 |
| 905476 | 54 | 85 | 95 | 97 | <0.1 |
| 905477 | 78 | 93 | 96 | 98 | <0.1 |
| 905510 | 65 | 84 | 90 | 94 | <0.1 |
| 905636 | 17 | 45 | 69 | 78 | 0.4 |
| 905667 | 41 | 65 | 82 | 89 | 0.1 |
| 905700 | 75 | 88 | 92 | 95 | <0.1 |

TABLE 46
Multi-dose assay with 3-10-3 cEt gapmers

| | % inhibition | | | | |
|---|---|---|---|---|---|
| Compound | 62.5 | 250 | 1,000 | 4,000 | IC₅₀ |
| Number | nM | nM | nM | nM | (μm) |
| 793406 | 68 | 81 | 90 | 95 | <0.1 |
| 903976 | 80 | 90 | 95 | 97 | <0.1 |
| 904103 | 61 | 79 | 87 | 91 | <0.1 |
| 904104 | 85 | 92 | 95 | 97 | <0.1 |
| 904264 | 72 | 81 | 85 | 85 | <0.1 |
| 904424 | 41 | 75 | 91 | 95 | 0.1 |
| 904680 | 74 | 87 | 94 | 96 | <0.1 |
| 904743 | 46 | 68 | 86 | 93 | 0.1 |
| 904744 | 82 | 92 | 97 | 98 | <0.1 |
| 904840 | 66 | 81 | 89 | 93 | <0.1 |
| 904871 | 64 | 75 | 90 | 95 | <0.1 |
| 904872 | 68 | 82 | 93 | 96 | <0.1 |
| 904968 | 53 | 78 | 89 | 94 | <0.1 |
| 905031 | 38 | 66 | 83 | 89 | 0.1 |
| 905032 | 53 | 78 | 89 | 93 | <0.1 |
| 905095 | 83 | 95 | 97 | 98 | <0.1 |
| 905479 | 82 | 89 | 94 | 95 | <0.1 |
| 905511 | 54 | 75 | 87 | 90 | <0.1 |
| 905704 | 61 | 84 | 93 | 96 | <0.1 |

TABLE 47
Multi-dose assay with 3-10-3 cEt gapmers

| | % inhibition | | | | |
|---|---|---|---|---|---|
| Compound | 62.5 | 250 | 1,000 | 4,000 | IC₅₀ |
| Number | nM | nM | nM | nM | (μm) |
| 793406 | 21 | 63 | 83 | 93 | 0.2 |
| 904009 | 35 | 68 | 88 | 95 | 0.1 |
| 904041 | 67 | 88 | 95 | 97 | <0.1 |
| 904202 | 24 | 62 | 77 | 88 | 0.2 |
| 904425 | 84 | 97 | 99 | 99 | <0.1 |
| 904426 | 37 | 72 | 90 | 95 | 0.1 |
| 904522 | 37 | 73 | 86 | 94 | 0.1 |
| 904619 | 49 | 83 | 94 | 98 | <0.1 |
| 904681 | 28 | 62 | 86 | 94 | 0.2 |
| 904713 | 23 | 53 | 72 | 82 | 0.3 |
| 904745 | 58 | 83 | 94 | 97 | <0.1 |
| 904746 | 75 | 92 | 98 | 99 | <0.1 |
| 904778 | 54 | 80 | 92 | 96 | <0.1 |
| 904873 | 50 | 80 | 93 | 97 | <0.1 |
| 904969 | 35 | 71 | 88 | 95 | 0.1 |
| 905128 | 42 | 70 | 83 | 88 | 0.1 |
| 905418 | 42 | 78 | 90 | 95 | <0.1 |
| 905513 | 38 | 73 | 90 | 95 | 0.1 |
| 905706 | 32 | 70 | 84 | 89 | 0.1 |

TABLE 48
Multi-dose assay with 3-10-3 cEt gapmers

| | % inhibition | | | | |
|---|---|---|---|---|---|
| Compound | 62.5 | 250 | 1,000 | 4,000 | IC₅₀ |
| Number | nM | nM | nM | nM | (μm) |
| 793406 | 12 | 55 | 80 | 90 | 0.3 |
| 903820 | 56 | 85 | 94 | 98 | <0.1 |
| 903821 | 63 | 89 | 97 | 98 | <0.1 |
| 904523 | 40 | 72 | 90 | 95 | 0.1 |
| 904716 | 33 | 63 | 85 | 92 | 0.1 |
| 904717 | 53 | 82 | 93 | 97 | <0.1 |
| 904718 | 39 | 73 | 88 | 95 | 0.1 |
| 904747 | 47 | 79 | 91 | 94 | <0.1 |
| 904748 | 60 | 83 | 93 | 95 | <0.1 |
| 905036 | 52 | 77 | 91 | 95 | <0.1 |
| 905292 | 46 | 75 | 91 | 95 | <0.1 |
| 905419 | 41 | 71 | 84 | 88 | 0.1 |
| 905422 | 19 | 59 | 88 | 97 | 0.2 |
| 905485 | 32 | 61 | 80 | 92 | 0.2 |
| 905580 | 35 | 71 | 89 | 96 | 0.1 |
| 905581 | 39 | 70 | 89 | 95 | 0.1 |
| 905582 | 19 | 65 | 86 | 94 | 0.2 |
| 905707 | 50 | 76 | 89 | 91 | <0.1 |
| 905867 | 33 | 67 | 84 | 92 | 0.1 |

TABLE 49
Multi-dose assay with 3-10-3 cEt gapmers

| | % inhibition | | | | |
|---|---|---|---|---|---|
| Compound | 62.5 | 250 | 1,000 | 4,000 | IC₅₀ |
| Number | nM | nM | nM | nM | (μm) |
| 793406 | 15 | 56 | 79 | 91 | 0.3 |
| 903825 | 72 | 89 | 94 | 95 | <0.1 |
| 903856 | 68 | 75 | 89 | N/A | <0.1 |
| 904209 | 61 | 89 | 96 | 96 | <0.1 |
| 904210 | 65 | 90 | 97 | 98 | <0.1 |
| 904720 | 31 | 70 | 92 | 95 | 0.1 |
| 905456 | 48 | 85 | 91 | 94 | <0.1 |
| 905457 | 45 | 70 | 84 | 89 | <0.1 |
| 905520 | 36 | 68 | 96 | 97 | 0.1 |
| 905521 | 30 | 65 | 88 | 97 | 0.1 |
| 905712 | 25 | 60 | 86 | 94 | 0.2 |
| 905808 | 37 | 74 | 90 | 92 | 0.1 |

TABLE 50
Multi-dose assay with 3-10-3 cEt gapmers

| | % inhibition | | | | |
|---|---|---|---|---|---|
| Compound | 62.5 | 250 | 1,000 | 4,000 | IC₅₀ |
| Number | nM | nM | nM | nM | (μm) |
| 793406 | 9 | 59 | 85 | 94 | 0.3 |
| 903826 | 47 | 81 | 93 | 97 | <0.1 |
| 903956 | 48 | 74 | 88 | 94 | <0.1 |
| 904082 | 56 | 84 | 93 | 95 | <0.1 |
| 904083 | 82 | 95 | 97 | 98 | <0.1 |
| 904084 | 83 | 96 | 98 | 98 | <0.1 |
| 904114 | 48 | 71 | 86 | 89 | <0.1 |
| 904211 | 62 | 88 | 96 | 98 | <0.1 |
| 904212 | 79 | 93 | 97 | 98 | <0.1 |
| 904242 | 33 | 61 | 81 | 89 | 0.2 |
| 904626 | 25 | 55 | 82 | 93 | 0.2 |
| 904627 | 86 | 93 | 99 | 99 | <0.1 |
| 904628 | 67 | 90 | 98 | 99 | <0.1 |
| 905139 | 54 | 83 | 94 | 97 | <0.1 |
| 905140 | 35 | 71 | 88 | 95 | 0.1 |
| 905490 | 66 | 85 | 91 | 92 | <0.1 |
| 905491 | 74 | 91 | 95 | 96 | <0.1 |
| 905586 | 35 | 63 | 81 | 88 | 0.1 |
| 905684 | 57 | 86 | 95 | 97 | <0.1 |

[0341] Cells were also plated at a density of 10,000 cells per well and transfected free uptake with various concentrations of antisense oligonucleotide, as specified in the Tables below. After a treatment period of approximately 16 hours, RNA was isolated from the cells and APOL1 mRNA levels were measured by quantitative real-time PCR. Human primer probe set HTS7376 (forward sequence GGCAGCCTTGTACTCTTGGAA, designated herein as SEQ ID NO: 1942; reverse sequence GCTGGTAATCCCGGTCAAAG, designated herein as SEQ ID NO: 1943; probe sequence CTGGGATGGAGTTGGGAATCACAGCCX, designated herein as SEQ ID NO: 1944) was used to measure mRNA levels. APOL1 mRNA levels were adjusted according to total RNA content, as measured by RIBOGREEN®. Results are presented as percent inhibition of APOL1, relative to untreated control cells.

[0342] The half maximal inhibitory concentration (IC₅₀) of each oligonucleotide is also presented. APOL1 mRNA levels were significantly reduced in a dose-dependent manner in antisense oligonucleotide treated cells.

TABLE 51
Multi-dose assay with 3-10-3 cEt gapmers

| | % inhibition | | | | |
|---|---|---|---|---|---|
| Compound | 62.5 | 250 | 1,000 | 4,000 | IC₅₀ |
| Number | nM | nM | nM | nM | (μm) |
| 793406 | 73 | 84 | 90 | 95 | <0.1 |
| 903807 | 59 | 83 | 91 | 95 | <0.1 |
| 903872 | 69 | 76 | 86 | 90 | <0.1 |
| 903999 | 76 | 85 | 93 | 94 | <0.1 |
| 904000 | 83 | 94 | 96 | 97 | <0.1 |
| 904001 | 95 | 97 | 98 | 98 | <0.1 |
| 904063 | 71 | 83 | 89 | 92 | <0.1 |
| 904223 | 38 | 48 | 63 | 74 | 0.3 |
| 904224 | 83 | 91 | 93 | 95 | <0.1 |
| 904254 | 28 | 50 | 72 | 72 | 0.3 |
| 904862 | 0 | 30 | 55 | 74 | 1.0 |
| 905086 | 8 | 32 | 65 | 72 | 0.7 |
| 905120 | 79 | 88 | 94 | 96 | <0.1 |
| 905374 | 59 | 67 | 77 | 82 | <0.1 |
| 905407 | 62 | 83 | 88 | 93 | <0.1 |
| 905408 | 68 | 82 | 90 | 94 | <0.1 |
| 905471 | 37 | 55 | 64 | 47 | 0.4 |
| 905600 | 73 | 88 | 93 | 97 | <0.1 |
| 905631 | 19 | 39 | 51 | 69 | 0.8 |

TABLE 52
Multi-dose assay with 3-10-3 cEt gapmers

| | % inhibition | | | | |
|---|---|---|---|---|---|
| Compound | 62.5 | 250 | 1,000 | 4,000 | IC₅₀ |
| Number | nM | nM | nM | nM | (μm) |
| 793406 | 71 | 83 | 91 | 95 | <0.1 |
| 903874 | 27 | 52 | 76 | 87 | 0.2 |
| 903939 | 82 | 92 | 96 | 97 | <0.1 |
| 904002 | 39 | 65 | 81 | 91 | 0.1 |
| 904003 | 62 | 82 | 90 | 94 | <0.1 |
| 904034 | 55 | 74 | 87 | 90 | <0.1 |
| 904226 | 60 | 85 | 91 | 93 | <0.1 |
| 904675 | 81 | 94 | 98 | 99 | <0.1 |
| 905121 | 78 | 89 | 93 | 95 | <0.1 |
| 905123 | 83 | 92 | 95 | 96 | <0.1 |
| 905473 | 82 | 86 | 86 | 88 | <0.1 |
| 905475 | 72 | 83 | 91 | 95 | <0.1 |
| 905505 | 42 | 73 | 87 | 91 | 0.1 |
| 905601 | 49 | 76 | 89 | 95 | <0.1 |
| 905633 | 40 | 72 | 84 | 86 | 0.1 |
| 905634 | 53 | 76 | 88 | 91 | <0.1 |
| 905665 | 61 | 79 | 89 | 93 | <0.1 |
| 905697 | 34 | 70 | 84 | 88 | 0.1 |
| 905698 | 91 | 97 | 99 | 99 | <0.1 |

TABLE 53
Multi-dose assay with 3-10-3 cEt gapmers

| | % inhibition | | | | |
|---|---|---|---|---|---|
| Compound | 62.5 | 250 | 1,000 | 4,000 | IC₅₀ |
| Number | nM | nM | nM | nM | (μm) |
| 793406 | 64 | 83 | 91 | 94 | <0.1 |
| 903501 | 65 | 82 | 95 | 95 | <0.1 |
| 903543 | 65 | 80 | 92 | 95 | <0.1 |
| 903596 | 100 | 84 | 91 | 95 | <0.1 |
| 903639 | 37 | 35 | 62 | 61 | 0.6 |
| 903991 | 22 | 42 | 44 | 44 | >4.0 |
| 903997 | 25 | 54 | 77 | 85 | 0.2 |
| 904055 | 39 | 47 | 76 | 89 | 0.2 |
| 904509 | 51 | 45 | 52 | 43 | 0.1 |
| 904629 | 30 | 58 | 83 | 86 | 0.2 |
| 905005 | 32 | 48 | 63 | 63 | 0.4 |
| 905015 | 39 | 58 | 72 | 81 | 0.1 |
| 905019 | 34 | 63 | 78 | 86 | 0.1 |
| 905037 | 42 | 63 | 69 | 75 | 0.1 |
| 905111 | 3 | 44 | 36 | 70 | 1.2 |
| 905141 | 14 | 50 | 76 | 92 | 0.3 |
| 905269 | 38 | 58 | 84 | 92 | 0.1 |
| 905469 | 56 | 81 | 90 | 95 | <0.1 |
| 905685 | 54 | 76 | 95 | 95 | <0.1 |

TABLE 54
Multi-dose assay with 3-10-3 cEt gapmers

| | % inhibition | | | | |
|---|---|---|---|---|---|
| Compound | 62.5 | 250 | 1,000 | 4,000 | IC₅₀ |
| Number | nM | nM | nM | nM | (μm) |
| 793406 | 18 | 54 | 78 | 84 | 0.3 |
| 903545 | 51 | 68 | 75 | 86 | <0.1 |
| 903557 | 30 | 54 | 65 | 72 | 0.3 |
| 903558 | 55 | 69 | 70 | 83 | <0.1 |
| 903564 | 57 | 65 | 64 | 79 | <0.1 |
| 903572 | 40 | 60 | 82 | 90 | 0.1 |
| 903573 | 48 | 66 | 65 | 80 | <0.1 |
| 903574 | 29 | 44 | 58 | 56 | 0.8 |
| 903585 | 40 | 66 | 63 | 70 | 0.1 |
| 903587 | 37 | 43 | 58 | 81 | 0.3 |
| 903595 | 56 | 72 | 79 | 88 | <0.1 |
| 903597 | 51 | 60 | 69 | 66 | <0.1 |
| 903598 | 28 | 27 | 65 | 62 | 0.8 |
| 903599 | 31 | 58 | 64 | 79 | 0.2 |
| 903600 | 43 | 61 | 61 | 79 | 0.1 |
| 903606 | 57 | 73 | 84 | 91 | <0.1 |
| 903607 | 55 | 69 | 85 | 82 | <0.1 |
| 903639 | 17 | 0 | 23 | 39 | >4.0 |
| 905037 | 0 | 21 | 3 | 37 | >4.0 |

[0343] In another assay, cells were plated at a density of 10,000 cells per well and transfected free uptake with various concentrations of antisense oligonucleotide, as specified in the Tables below. After a treatment period of approximately 16 hours, RNA was isolated from the cells and APOL1 mRNA levels were measured by quantitative real-time PCR. Human primer probe set RTS35962 was used to measure mRNA levels. APOL1 mRNA levels were adjusted according to total RNA content, as measured by RIBOGREEN®. Results are presented as percent inhibition of APOL1, relative to untreated control cells.

[0344] The half maximal inhibitory concentration (IC₅₀) of each oligonucleotide is also presented. APOL1 mRNA levels were significantly reduced in a dose-dependent manner in antisense oligonucleotide treated cells.

TABLE 55
Multi-dose assay with 3-10-3 cEt gapmers

| | % inhibition | | | | | | |
|---|---|---|---|---|---|---|---|
| Compound | 4.8 | 19.5 | 78.1 | 312.5 | 1,250 | 5,000 | IC₅₀ |
| Number | nM | nM | nM | nM | nM | nM | (μM) |
| 793406 | 0 | 0 | 24 | 53 | 75 | 87 | 0.2 |
| 793444 | 0 | 0 | 4 | 21 | 31 | 53 | 0.9 |
| 903822 | 49 | 0 | 27 | 53 | 74 | 88 | 0.2 |
| 904082 | 1 | 14 | 57 | 87 | 91 | 90 | 0.1 |
| 904101 | 5 | 15 | 28 | 67 | 80 | 86 | 0.2 |
| 904226 | 11 | 22 | 71 | 94 | 98 | 99 | 0.1 |
| 904628 | 8 | 21 | 59 | 87 | 96 | 98 | 0.1 |
| 904763 | 13 | 17 | 46 | 85 | 95 | 98 | 0.1 |
| 905032 | 17 | 16 | 60 | 87 | 95 | 97 | 0.1 |

TABLE 56
Multi-dose assay with 3-10-3 cEt gapmers

| | % inhibition | | | | | | |
|---|---|---|---|---|---|---|---|
| Compound | 4.8 | 19.5 | 78.1 | 312.5 | 1,250 | 5,000 | IC₅₀ |
| Number | nM | nM | nM | nM | nM | nM | (μM) |
| 905139 | 0 | 0 | 48 | 82 | 91 | 96 | 0.2 |
| 905373 | 10 | 20 | 74 | 93 | 98 | 99 | 0.1 |
| 905469 | 11 | 0 | 38 | 73 | 88 | 96 | 0.2 |
| 905505 | 18 | 27 | 74 | 94 | 96 | 98 | 0.1 |
| 905521 | 13 | 2 | 35 | 75 | 88 | 95 | 0.2 |
| 905633 | 20 | 38 | 79 | 96 | 98 | 99 | 0.1 |
| 905634 | 14 | 22 | 60 | 90 | 96 | 98 | 0.1 |
| 905665 | 0 | 15 | 40 | 74 | 88 | 94 | 0.1 |
| 905758 | 31 | 0 | 30 | 61 | 85 | 89 | 0.2 |

[0345] In another assay, cells were plated at a density of 11,000 cells per well and transfected free uptake with various concentrations of antisense oligonucleotide, as specified in the Tables below. After a treatment period of approximately 16 hours, RNA was isolated from the cells and APOL1 mRNA levels were measured by quantitative real-time PCR. Human primer probe set RTS35962 was used to measure mRNA levels. APOL1 mRNA levels were adjusted according to total RNA content, as measured by RIBOGREEN®. Results are presented as percent inhibition of APOL1, relative to untreated control cells.

[0346] The half maximal inhibitory concentration (IC₅₀) of each oligonucleotide is also presented. APOL1 mRNA levels were significantly reduced in a dose-dependent manner in antisense oligonucleotide treated cells.

TABLE 57
Multi-dose assay with deoxy, MOE, and cEt gapmers

| | | % inhibition | | | | | |
|---|---|---|---|---|---|---|---|
| Compound | | 8 | 40 | 200 | 1000 | 5000 | IC₅₀ |
| Number | Chemistry | nM | nM | nM | nM | nM | (μM) |
| 969157 | kek-d9-eekk | 0 | 31 | 83 | 98 | 99 | 0.07 |
| 969162 | kek-d9-eekk | 20 | 70 | 98 | 99 | 99 | 0.02 |
| 969210 | kk-d10-keke | 12 | 64 | 96 | 98 | 99 | 0.03 |
| 969361 | kk-d9-eeekk | 13 | 52 | 94 | 98 | 99 | 0.04 |
| 969408 | kk-d9-ekeke | 10 | 53 | 91 | 98 | 99 | 0.04 |
| 969433 | kk-d9-ekeke | 8 | 58 | 92 | 96 | 96 | 0.03 |
| 969437 | kk-d9-ekeke | 14 | 47 | 91 | 97 | 98 | 0.04 |
| 969502 | kk-d9-kdkdk | 5 | 41 | 87 | 95 | 95 | 0.05 |
| 971997 | kkk-d8-kdkdk | 1 | 34 | 79 | 93 | 94 | 0.07 |
| 972002 | kkk-d8-kdkdk | 12 | 57 | 86 | 92 | 92 | 0.04 |
| 972116 | kkk-d9-keke | 14 | 53 | 90 | 96 | 96 | 0.04 |
| 972139 | kkk-d9-kkke | 20 | 59 | 94 | 99 | 99 | 0.03 |
| 972163 | kkk-d9-kkke | 20 | 65 | 94 | 96 | 96 | 0.02 |
| 972190 | kkk-d9-kkke | 19 | 38 | 84 | 97 | 99 | 0.05 |
| 972268 | kkk-d10-kkk | 15 | 42 | 81 | 91 | 93 | 0.05 |

[0347] In another assay, cells were plated at a density of 10,000 cells per well and transfected free uptake with various concentrations of antisense oligonucleotide, as specified in the Tables below. After a treatment period of approximately 16 hours, RNA was isolated from the cells and APOL1 mRNA levels were measured by quantitative real-time PCR. Human primer probe set RTS35962 was used to measure mRNA levels. APOL1 mRNA levels were adjusted according to total RNA content, as measured by RIBOGREEN®. Results are presented as percent inhibition of APOL1, relative to untreated control cells.

[0348] The half maximal inhibitory concentration (IC₅₀) of each oligonucleotide is also presented. APOL1 mRNA levels were significantly reduced in a dose-dependent manner in antisense oligonucleotide treated cells.

TABLE 58
Multi-dose assay with deoxy, MOE, and cEt gapmers

| | | % inhibition | | | | |
|---|---|---|---|---|---|---|
| Compound | | 15.6 | 62.5 | 250 | 1,000 | IC₅₀ |
| Number | Chemistry | nM | nM | nM | nM | (μM) |
| 905095 | kkk-d10-kkk | 39 | 87 | 98 | 99 | <0.01 |
| 905491 | kkk-d10-kkk | 37 | 66 | 88 | 94 | 0.03 |
| 905634 | kkk-d10-kkk | 31 | 55 | 86 | 94 | 0.04 |
| 969064 | k-d10-kekek | 22 | 50 | 80 | 91 | 0.1 |
| 969084 | k-d10-kekek | 26 | 56 | 78 | 92 | 0.1 |
| 969164 | kek-d9-eekk | 23 | 63 | 90 | 97 | 0.05 |
| 969194 | kk-d10-keke | 26 | 56 | 81 | 92 | 0.1 |
| 969204 | kk-d10-keke | 11 | 47 | 82 | 94 | 0.1 |
| 969214 | kk-d10-keke | 33 | 75 | 91 | 96 | 0.02 |
| 969314 | kk-d9-eeekk | 2 | 31 | 67 | 89 | 0.1 |
| 969354 | kk-d9-eeekk | 15 | 48 | 76 | 92 | 0.1 |
| 969404 | kk-d9-ekeke | 8 | 37 | 69 | 64 | 0.2 |
| 969474 | kk-d9-kdkdk | 15 | 44 | 76 | 93 | 0.1 |
| 971944 | kk-d9-kekek | 25 | 59 | 84 | 93 | 0.05 |
| 971984 | kk-d9-kekek | 21 | 38 | 69 | 89 | 0.1 |
| 972014 | kkk-d8-kdkdk | 18 | 54 | 81 | 93 | 0.1 |
| 972044 | kkk-d8-kekek | 30 | 57 | 84 | 94 | 0.04 |
| 972124 | kkk-d9-keke | 50 | 80 | 96 | 97 | <0.01 |
| 972144 | kkk-d9-kkke | 15 | 60 | 87 | 94 | 0.1 |

TABLE 59
Multi-dose assay with deoxy, MOE, and cEt gapmers

| | | % inhibition | | | | |
|---|---|---|---|---|---|---|
| Compound | | 15.6 | 62.5 | 250 | 1,000 | IC₅₀ |
| Number | Chemistry | nM | nM | nM | nM | (μM) |
| 905095 | kkk-d10-kkk | 38 | 88 | 98 | 99 | <0.01 |
| 969155 | kek-d9-eekk | 13 | 42 | 69 | 87 | 0.1 |
| 969175 | kk-d10-keke | 6 | 35 | 67 | 85 | 0.1 |
| 969185 | kk-d10-keke | 10 | 59 | 87 | 96 | 0.1 |
| 969205 | kk-d10-keke | 18 | 46 | 74 | 90 | 0.1 |
| 969254 | kk-d8-kekekk | 5 | 12 | 44 | 80 | 0.3 |
| 969345 | kk-d9-eeekk | 8 | 38 | 84 | 96 | 0.1 |
| 969355 | kk-d9-eeekk | 21 | 60 | 86 | 94 | 0.1 |
| 969434 | kk-d9-ekeke | 6 | 23 | 59 | 80 | 0.2 |
| 969435 | kk-d9-ekeke | 23 | 62 | 89 | 97 | 0.05 |
| 969475 | kk-d9-kdkdk | 9 | 38 | 68 | 89 | 0.1 |
| 971925 | kk-d9-kekek | 44 | 77 | 92 | 96 | <0.01 |
| 971995 | kkk-d8-kdkdk | 23 | 61 | 84 | 93 | 0.1 |
| 972004 | kkk-d8-kdkdk | 24 | 59 | 82 | 86 | 0.1 |
| 972104 | kkk-d9-keke | 16 | 47 | 74 | 90 | 0.1 |
| 972146 | kkk-d9-kkke | 45 | 78 | 95 | 98 | <0.01 |
| 972165 | kkk-d9-kkke | 2 | 46 | 76 | 87 | 0.1 |
| 972174 | kkk-d9-kkke | 5 | 25 | 64 | 82 | 0.2 |
| 972194 | kkk-d9-kkke | 3 | 24 | 54 | 80 | 0.2 |

TABLE 60
Multi-dose assay with deoxy, MOE, and cEt gapmers

| | | % inhibition | | | | |
|---|---|---|---|---|---|---|
| Compound | | 15.6 | 62.5 | 250 | 1,000 | IC₅₀ |
| Number | Chemistry | nM | nM | nM | nM | (μM) |
| 905095 | kkk-d10-kkk | 63 | 94 | 99 | 99 | <0.01 |
| 969056 | k-d10-kekek | 29 | 50 | 70 | 87 | 0.1 |
| 969076 | k-d10-kekek | 14 | 46 | 80 | 92 | 0.1 |
| 969086 | k-d10-kekek | 24 | 58 | 86 | 96 | 0.1 |
| 969156 | kek-d9-eekk | 0 | 37 | 76 | 90 | 0.1 |
| 969157 | kek-d9-eekk | 37 | 71 | 91 | 98 | 0.02 |
| 969186 | kk-d10-keke | 11 | 44 | 80 | 93 | 0.1 |
| 969206 | kk-d10-keke | 33 | 59 | 81 | 92 | 0.04 |
| 969226 | kk-d8-eeeekk | 0 | 30 | 61 | 87 | 0.2 |
| 969316 | kk-d9-eeekk | 10 | 49 | 79 | 93 | 0.1 |
| 969336 | kk-d9-eeekk | 20 | 35 | 65 | 85 | 0.1 |
| 969406 | kk-d9-ekeke | 25 | 53 | 79 | 91 | 0.1 |
| 972046 | kkk-d8-kekek | 26 | 46 | 68 | 88 | 0.1 |
| 972096 | kkk-d9-keke | 24 | 66 | 89 | 95 | 0.04 |
| 972116 | kkk-d9-keke | 35 | 72 | 90 | 95 | 0.03 |
| 972166 | kkk-d9-kkke | 17 | 48 | 72 | 88 | 0.1 |
| 972176 | kkk-d9-kkke | 21 | 56 | 85 | 93 | 0.1 |
| 972186 | kkk-d9-kkke | 36 | 70 | 92 | 96 | 0.02 |
| 972196 | kkk-d9-kkke | 33 | 73 | 90 | 92 | 0.03 |

TABLE 61
Multi-dose assay with deoxy, MOE, and cEt gapmers

| | | % inhibition | | | | |
|---|---|---|---|---|---|---|
| Compound | | 15.6 | 62.5 | 250 | 1,000 | IC₅₀ |
| Number | Chemistry | nM | nM | nM | nM | (μM) |
| 904082 | kkk-d10-kkk | 38 | 62 | 87 | 93 | 0.03 |
| 905095 | kkk-d10-kkk | 63 | 93 | 98 | 99 | <0.01 |
| 969087 | k-d10-kekek | 0 | 52 | 79 | 91 | 0.1 |
| 969127 | k-d9-kekeke | 0 | 46 | 78 | 90 | 0.1 |
| 969187 | kk-d10-keke | 17 | 38 | 75 | 86 | 0.1 |
| 969207 | kk-d10-keke | 36 | 46 | 78 | 91 | 0.1 |
| 969217 | kk-d10-keke | 14 | 41 | 74 | 92 | 0.1 |
| 969337 | kk-d9-eeekk | 35 | 62 | 81 | 92 | 0.03 |
| 969347 | kk-d9-eeekk | 38 | 72 | 91 | 96 | 0.02 |
| 969377 | kk-d9-eeekk | 41 | 68 | 85 | 91 | 0.02 |
| 969437 | kk-d9-ekeke | 40 | 78 | 92 | 97 | 0.02 |
| 969457 | kk-d9-ekeke | 36 | 65 | 83 | 92 | 0.03 |
| 969467 | kk-d9-ekeke | 20 | 58 | 84 | 92 | 0.1 |
| 971967 | kk-d9-kekek | 20 | 41 | 75 | 90 | 0.1 |
| 971997 | kkk-d8-kdkdk | 40 | 66 | 85 | 93 | 0.02 |
| 972027 | kkk-d8-kekek | 17 | 61 | 80 | 89 | 0.1 |
| 972097 | kkk-d9-keke | 21 | 67 | 89 | 97 | 0.05 |
| 972147 | kkk-d9-kkke | 34 | 61 | 83 | 92 | 0.04 |
| 972197 | kkk-d9-kkke | 43 | 69 | 88 | 94 | 0.02 |

TABLE 62
Multi-dose assay with deoxy, MOE, and cEt gapmers

| | | % inhibition | | | | |
|---|---|---|---|---|---|---|
| Compound | | 15.6 | 62.5 | 250 | 1,000 | IC₅₀ |
| Number | Chemistry | nM | nM | nM | nM | (μM) |
| 904619 | kkk-d10-kkk | 24 | 50 | 84 | 93 | 0.1 |
| 905095 | kkk-d10-kkk | 74 | 94 | 99 | 100 | <0.01 |
| 969158 | kek-d9-eekk | 31 | 40 | 70 | 89 | 0.1 |
| 969167 | kek-d9-eekk | 14 | 43 | 64 | 84 | 0.1 |
| 969178 | kk-d10-keke | 27 | 56 | 80 | 93 | 0.1 |
| 969198 | kk-d10-keke | 31 | 53 | 79 | 92 | 0.1 |
| 969318 | kk-d9-eeekk | 37 | 78 | 94 | 98 | 0.02 |
| 969358 | kk-d9-eeekk | 28 | 61 | 86 | 96 | 0.04 |
| 969368 | kk-d9-eeekk | 39 | 72 | 91 | 97 | 0.02 |
| 969388 | kk-d9-eeekk | 18 | 51 | 79 | 91 | 0.1 |
| 969407 | kk-d9-ekeke | 8 | 30 | 61 | 86 | 0.2 |
| 969408 | kk-d9-ekeke | 36 | 66 | 90 | 96 | 0.03 |
| 969428 | kk-d9-ekeke | 40 | 41 | 71 | 90 | 0.1 |
| 969448 | kk-d9-ekeke | 33 | 61 | 86 | 96 | 0.04 |
| 969458 | kk-d9-ekeke | 19 | 40 | 74 | 92 | 0.1 |
| 969477 | kk-d9-kdkdk | 16 | 34 | 72 | 85 | 0.1 |
| 969497 | kk-d9-kdkdk | 3 | 28 | 59 | 75 | 0.2 |
| 971987 | kkk-d10-kkk | 8 | 17 | 51 | 80 | 0.2 |
| 972178 | kkk-d9-kkke | 19 | 54 | 78 | 91 | 0.1 |

TABLE 63
Multi-dose assay with deoxy, MOE, and cEt gapmers

| | | % inhibition | | | | |
|---|---|---|---|---|---|---|
| Compound | | 15.6 | 62.5 | 250 | 1,000 | IC₅₀ |
| Number | Chemistry | nM | nM | nM | nM | (μM) |
| 905095 | kkk-d10-kkk | 65 | 94 | 99 | 99 | <0.01 |
| 969159 | kek-d9-eekk | 21 | 46 | 84 | 96 | 0.1 |
| 969169 | kek-d9-eekk | 22 | 41 | 69 | 89 | 0.1 |
| 969208 | kk-d10-keke | 25 | 53 | 84 | 89 | 0.1 |
| 969219 | kk-d10-keke | 16 | 35 | 66 | 87 | 0.1 |
| 969289 | kk-d8-kekekk | 3 | 36 | 70 | 88 | 0.1 |
| 969328 | kk-d9-eeekk | 19 | 40 | 61 | 85 | 0.1 |
| 969338 | kk-d9-eeekk | 13 | 34 | 72 | 90 | 0.1 |
| 969359 | kk-d9-eeekk | 24 | 61 | 84 | 93 | 0.05 |
| 969389 | kk-d9-eeekk | 20 | 42 | 77 | 92 | 0.1 |
| 969398 | kk-d9-ekeke | 14 | 41 | 62 | 86 | 0.1 |
| 969449 | kk-d9-ekeke | 43 | 64 | 83 | 92 | 0.02 |
| 969469 | kk-d9-kdkdk | 25 | 63 | 83 | 94 | 0.05 |
| 969479 | kk-d9-kdkdk | 40 | 71 | 91 | 96 | 0.02 |
| 969498 | kk-d9-kdkdk | 10 | 40 | 71 | 87 | 0.1 |
| 969508 | kk-d9-kdkdk | 17 | 34 | 70 | 88 | 0.1 |
| 971969 | kk-d9-kekek | 28 | 63 | 86 | 92 | 0.04 |
| 972118 | kkk-d9-keke | 10 | 42 | 70 | 87 | 0.1 |
| 972139 | kkk-d9-kkke | 35 | 69 | 88 | 96 | 0.03 |

TABLE 64
Multi-dose assay with deoxy, MOE, and cEt gapmers

| | | % inhibition | | | | |
|---|---|---|---|---|---|---|
| Compound | | 15.6 | 62.5 | 250 | 1,000 | IC₅₀ |
| Number | Chemistry | nM | nM | nM | nM | (μM) |
| 905095 | kkk-d10-kkk | 68 | 93 | 99 | 99 | <0.01 |
| 969160 | kek-d9-eekk | 39 | 73 | 92 | 96 | 0.02 |
| 969180 | kk-d10-keke | 7 | 38 | 74 | 92 | 0.10 |
| 969210 | kk-d10-keke | 59 | 89 | 97 | 99 | <0.01 |
| 969229 | kk-d8-eeeekk | 4 | 23 | 80 | 91 | 0.10 |
| 969340 | kk-d9-eeekk | 23 | 60 | 87 | 98 | 0.05 |
| 969350 | kk-d9-eeekk | 12 | 46 | 74 | 92 | 0.10 |
| 969380 | kk-d9-eeekk | 27 | 59 | 84 | 93 | 0.05 |
| 969409 | kk-d9-ekeke | 22 | 48 | 80 | 93 | 0.10 |
| 969419 | kk-d9-ekeke | 8 | 25 | 58 | 84 | 0.20 |
| 969429 | kk-d9-ekeke | 17 | 41 | 71 | 85 | 0.10 |
| 969430 | kk-d9-ekeke | 29 | 59 | 83 | 96 | 0.05 |
| 969440 | kk-d9-ekeke | 29 | 60 | 82 | 95 | 0.04 |
| 972069 | kkk-d8-kekek | 25 | 55 | 84 | 93 | 0.10 |
| 972119 | kkk-d9-keke | 15 | 41 | 73 | 83 | 0.10 |
| 972120 | kkk-d9-keke | 32 | 65 | 88 | 96 | 0.03 |
| 972129 | kkk-d9-keke | 9 | 42 | 75 | 85 | 0.10 |
| 972189 | kkk-d9-kkke | 32 | 63 | 84 | 91 | 0.04 |
| 972190 | kkk-d9-kkke | 38 | 71 | 93 | 98 | 0.02 |

### Example 3: Tolerability of Modified Oligonucleotides Targeting Human APOL1 in BALB/c Mice

[0349] BALB/c mice are a multipurpose mouse model frequently utilized for safety and efficacy testing. The mice were treated with antisense oligonucleotides selected from studies described above and evaluated for changes in the levels of various plasma chemistry markers.

### Treatment

[0350] Groups of 6- to 7-week-old male mice were injected subcutaneously once with 200 mg/kg of modified oligonucleotides. One group of male BALB/c mice was injected with PBS. Mice were euthanized 72-96 hours after the single dose and plasma was harvested for further analysis.

### Study 1

[0351] To evaluate the effect of modified oligonucleotides on liver function, plasma levels of transaminases were measured using an automated clinical chemistry analyzer (Beckman Coulter AU480, Brea, Calif.). Modified oligonucleotides that caused changes in the levels of transaminases outside the expected range for antisense oligonucleotides were excluded in further studies. Compound IDs 793406, 903807, 903822, 903853, 904016, 904063, 904082, 904084, 904101, 904212, 904223, 904224, 904226, 904424, 904426, 904443, 904444, 904619, 904627, 904628, 904763, 904766, 905031, 905032, 905036, 905095, 905121, 905123, 905139, 905141, 905143, 905146, 905147, 905269, 905373, 905408, 905418, 905469, 905471, 905491, 905496, 905505, 905510, 905511, 905521, 905581, 905582, 905633, 905634, 905636, 905654, 905655, 905665, 905684, 905688, 905690, 905697, 905700, 905758 and 905867 were considered tolerable in this study and were selected for further evaluation.

### Study 2

[0352] In a second study to evaluate the effect of modified oligonucleotides on liver function, plasma levels of transaminases were measured using an automated clinical chemistry analyzer (Beckman Coulter AU480, Brea, Calif.). Modified oligonucleotides that caused changes in the levels of transaminases outside the expected range for antisense oligonucleotides were excluded in further studies. Compound IDs 969157, 969160, 969162, 969210, 969214, 969231, 969318, 969347, 969361, 969362, 969408, 969433, 969437, 969479, 969501, 969502, 971925, 971973, 971997, 972002, 972116, 972139, 972163, 972190, 972268, and 972288 were considered tolerable in this study and were selected for further evaluation.

### Example 4: Effect of Antisense Inhibition of hAPOL1 in a Transgenic Mouse Model

[0353] A transgenic mouse model was developed using the Fosmid ABC12-49114000M18, digested to produce a 31.6 Kb fragment containing only the APOL1 gene with 5 Kb upstream and 12 Kb downstream of the gene. The gene fragment was inserted into eggs from C57BL/6NTAc mice by pronuclear injection to produce two founder lines. Line 1 was used for the experiments described herein. Human APOL1 transcript is predominantly detectable in the liver, with hAPOL1 protein robustly detectable in the plasma of these mice. The efficacy of modified oligonucleotides was evaluated in this model.

[0354] Transgenic mice were maintained on a 12-hour light/dark cycle and were fed ad libitum normal Purina mouse chow. Animals were acclimated for at least 7 days in the research facility before initiation of the experiment. Antisense oligonucleotides (ASOs) were prepared in buffered saline (PBS) and sterilized by filtering through a 0.2 micron filter. Oligonucleotides were dissolved in PBS for injection.

### Study 1

[0355] The hAPOL1 transgenic mice were divided into groups of 2-4 mice each. Groups received subcutaneous injections of modified oligonucleotide at a dose of 25 mg/kg three times a week for one week, 3 total doses. One group of mice received subcutaneous injections of control oligonucleotide 549148 (GGCTACTACGCCGTCA, designated SEQ ID NO: 1948; a 3-10-3 cEt gapmer with no known target) at a dose of 25 mg/kg three times a week for one week, 3 total doses. One group of mice received subcutaneous injections of PBS three times per week for one week. The saline-injected group served as the control group to which oligonucleotide-treated groups were compared.

[0356] On day 7, animals were sacrificed and RNA was extracted from kidney and liver for real-time PCR analysis of hAPOL1 mRNA expression. Results are presented as percent change of mRNA, relative to PBS control, normalized with RIBOGREEN®. Two separate experiments were conducted with similar conditions and are presented in separate tables. As shown in the tables below, treatment with antisense oligonucleotides resulted in significant reduction of hAPO1 mRNA in comparison to the PBS control.

TABLE 65
Percent inhibition of APOL1 by 3-10-3 cEt gapmers in
transgenic mice relative to the PBS control

| Compound | % Inhibition | % inhibition |
|---|---|---|
| ID | (liver) | (kidney) |
| 549148 | 15 | 5 |
| 793406 | 83 | 29 |
| 903853 | 82 | 37 |
| 904016 | 64 | 21 |
| 904063 | 49 | 0 |
| 904082 | 93 | 46 |
| 904212 | 69 | 24 |
| 904223 | 66 | 10 |
| 904224 | 65 | 15 |
| 904226 | 89 | 28 |
| 904424 | 59 | 13 |
| 904426 | 43 | 27 |
| 904443 | 75 | 16 |
| 904444 | 65 | 26 |
| 904627 | 96 | 50 |
| 904628 | 77 | 43 |
| 905031 | 86 | 15 |
| 905032 | 92 | 38 |
| 905036 | 80 | 23 |
| 905141 | 90 | 1 |
| 905143 | 75 | 0 |
| 905146 | 76 | 20 |
| 905147 | 79 | 0 |
| 905269 | 54 | 8 |
| 905373 | 86 | 46 |
| 905408 | 78 | 10 |
| 905418 | 67 | 20 |
| 905471 | 87 | 32 |
| 905496 | 71 | 21 |
| 905505 | 95 | 16 |
| 905511 | 92 | 40 |
| 905521 | 86 | 31 |
| 905581 | 55 | 6 |
| 905582 | 51 | 0 |
| 905633 | 79 | 32 |
| 905636 | 22 | 0 |
| 905655 | 63 | 18 |
| 905688 | 81 | 3 |
| 905690 | 74 | 21 |
| 905697 | 81 | 7 |
| 905758 | 85 | 44 |
| 905867 | 83 | 31 |

TABLE 66
Percent inhibition of APOL1 by 3-10-3 cEt gapmers in
transgenic mice relative to the PBS control

| Compound | % Inhibition | % inhibition |
|---|---|---|
| ID | (liver) | (kidney) |
| 549148 | 10 | 7 |
| 793406 | 73 | 37 |
| 903807 | 51 | 32 |
| 903822 | 93 | 50 |
| 904084 | 87 | 43 |
| 904619 | 86 | 48 |
| 904763 | 88 | 56 |
| 904766 | 82 | 65 |
| 905095 | 92 | 69 |
| 904101 | 58 | 47 |
| 905121 | 93 | 66 |
| 905123 | 74 | 49 |
| 905139 | 87 | 51 |
| 905469 | 83 | 56 |
| 905491 | 95 | 69 |
| 905510 | 95 | 61 |
| 905634 | 60 | 46 |
| 905654 | 53 | 40 |
| 905665 | 85 | 47 |
| 905684 | 52 | 33 |
| 905700 | 79 | 45 |

### Study 2

[0357] The hAPOL1 transgenic mice were divided into groups of 4 mice each. Groups received subcutaneous injections of modified oligonucleotide at a dose of 25 mg/kg twice a week for 1 weeks for 3 total doses. One group of mice received subcutaneous injections of control oligonucleotide 549148 at a dose of 25 mg/kg three times a week for one week, 3 total doses. One group of mice received subcutaneous injections of PBS three times a week for 1 week. The saline-injected group served as the control group to which oligonucleotide-treated groups were compared.

[0358] On day 7, animals were sacrificed and RNA was extracted from kidney and liver for real-time PCR analysis of measurement of hAPOL1 mRNA expression. Results are presented as percent change of mRNA, relative to PBS control, normalized with RIBOGREEN©. As shown in the tables below, treatment with antisense oligonucleotides resulted in significant reduction of hAPO1 mRNA in comparison to the PBS control.

TABLE 67
Percent inhibition of APOL1 by gapmers in
transgenic mice relative to the PBS control

| Compound | | Inhibition % | inhibition % |
|---|---|---|---|
| ID | Chemistry | (liver) | (kidney) |
| 549148 | kkk-d10-kkk | 2 | 0 |
| 793406 | kkk-d10-kkk | 88 | 32 |
| 969157 | kek-d9-eekk | 85 | 41 |
| 969160 | kek-d9-eekk | 78 | 41 |
| 969162 | kek-d9-eekk | 92 | 56 |
| 969210 | kk-10-keke | 88 | 35 |
| 969214 | kk-d10-keke | 89 | 45 |
| 969231 | kk-d8-eeeekk | 57 | 29 |
| 969318 | kk-d9-eeekk | 64 | 17 |
| 969347 | kk-d9-eeekk | 75 | 22 |
| 969361 | kk-9-eeekk | 61 | 38 |
| 969362 | kk-d9-eeekk | 74 | 21 |
| 969408 | kk-d9-ekeke | 84 | 40 |
| 969433 | kk-d9-ekeke | 84 | 37 |
| 969437 | kk-d9-ekeke | 94 | 44 |
| 969479 | kk-d9-kdkdk | 74 | 23 |
| 969501 | kk-d9-kdkdk | 80 | 30 |
| 969502 | kk-9-kdkdk | 83 | 43 |
| 971925 | kk-d9-kekek | 78 | 39 |
| 971973 | kk-d9-kekek | 82 | 26 |
| 971997 | kkk-d8-kdkdk | 76 | 36 |
| 972002 | kkk-d8-kdkdk | 81 | 54 |
| 972116 | kkk-d9-keke | 80 | 46 |
| 972139 | kkk-d9-kkke | 88 | 56 |
| 972163 | kkk-d9-kkke | 91 | 52 |
| 972190 | kkk-d9-kkke | 90 | 46 |
| 972268 | kkk-d10-kkk | 50 | 46 |
| 972288 | kkk-d10-kkk | 64 | 28 |

Study 3: Effect of Antisense Inhibition of APOL1 on Mice with Proteinuria

[0359] hAPOL1 transgenic mice were divided into groups of 3-4 mice each. Groups received subcutaneous injections of modified oligonucleotide 972190 at a dose of 50 mg/kg once a week for 4 weeks. One group of mice received subcutaneous injections of control oligonucleotide 549148 at a dose of 50 mg/kg once a week for 4 weeks. One group of mice received subcutaneous injections of PBS once a week for 4 weeks. A single dose of IFNγ was administered at 1.125×10⁷ U/kg one day after the last oligonucleotide dose in order to induce proteinuria in the mice. The saline-injected group served as the control group to which oligonucleotide-treated groups were compared.

[0360] Urine was collected and the animals were sacrificed 48 hours after the IFNγ administration. RNA was extracted from kidney and liver for real-time PCR analysis of measurement of hAPOL1 mRNA expression. Results are presented as percent change of mRNA, relative to PBS control, normalized with RIBOGREEN®. As shown in the tables below, treatment with antisense oligonucleotides resulted in significant reduction of hAPO1 mRNA in comparison to the PBS control. As also shown in the tables below, treatment with 972190 resulted in significant reduction of urinary albumin and plasma ALT levels in comparison to control animals dosed with IFNγ. The results indicate that treatment with modified oligonucleotides targeting APOL1 protected APOL1 transgenic mice from proteinuria and reduced elevations in plasma ALT levels.

TABLE 68
Percent expression of APOL1 by gapmers in
transgenic mice relative to PBS control

| | IFNγ | | |
|---|---|---|---|
| Treatment | treatment | Kidney | Liver |
| PBS | Yes | 179 | 120 |
| 549148 | No | 76 | 133 |
| | Yes | 140 | 142 |
| 972190 | No | 41 | 7 |
| | Yes | 47 | 3 |

TABLE 68
Effect of inhibition of APOL1 by gapmers in
transgenic mice relative to the control

| | IFNγ | Urinary albumin | Plasma ALT |
|---|---|---|---|
| Treatment | treatment | (μg/mg creatinine) | (IU/L) |
| PBS | No | 41 | 163 |
| | Yes | 727 | 211 |
| 549148 | No | 77 | 207 |
| | Yes | 980 | 225 |
| 972190 | No | 56 | 63 |
| | Yes | 50 | 61 |

### Example 5: Tolerability of Modified Oligonucleotides Targeted to hAPOL1 in CD1 Mice

[0361] CD1® mice (Charles River, Mass.) are a multipurpose mouse model, frequently utilized for safety and efficacy testing. The mice were treated with 3-10-3 cEt gapmer oligonucleotides selected from the studies described above and evaluated for changes in the levels of various plasma chemistry markers.

### Treatment

[0362] Groups of 7-8-week-old male CD1 mice were injected subcutaneously twice a week for six weeks with 25 mg/kg of ISIS oligonucleotides (50 mg/kg/week dose). One group of male CD1 mice was injected subcutaneously twice a week for 6 weeks with PBS. Mice were euthanized 48 hours after the last dose, and organs and plasma were harvested for further analysis. Two separate studies were conducted with similar conditions and are presented in separate tables for each end-point analysis.

### Study 1

### Plasma Chemistry Markers

[0363] To evaluate the effect of ISIS oligonucleotides on liver and kidney function, plasma levels of transaminases, albumin, bilirubin, creatinine, and BUN were measured using an automated clinical chemistry analyzer (Beckman Coulter AU480, Brea, Calif.). The results are presented in the Table below. ISIS oligonucleotides that caused changes in the levels of any of the liver or kidney function markers outside the expected range for antisense oligonucleotides were excluded in further studies.

TABLE 68
Plasma chemistry markers in CD1 mice plasma at week 6

| | | | | | Creati- | |
|---|---|---|---|---|---|---|
| Compound | ALT | AST | Albumin | BUN | nine | T. Bil |
| ID | (IU/L) | (IU/L) | (g/dL) | (mg/dL) | (mg/dL) | (mg/dL) |
| PBS | 26 | 43 | 2.7 | 21.3 | 0.05 | 0.3 |
| 793406 | 42 | 75 | 2.6 | 21.7 | 0.04 | 0.3 |
| 903853 | 413 | 470 | 2.5 | 22.8 | 0.06 | 0.3 |
| 904082 | 33 | 54 | 2.6 | 21.4 | 0.07 | 0.2 |
| 904226 | 40 | 74 | 2.4 | 21.1 | 0.05 | 0.2 |
| 904627 | 1122 | 1245 | 2.4 | 19.6 | 0.06 | 0.2 |
| 904628 | 41 | 75 | 2.5 | 22.5 | 0.02 | 0.2 |
| 905032 | 106 | 84 | 2.5 | 23.6 | 0.04 | 0.2 |
| 905373 | 81 | 88 | 2.4 | 22.4 | 0.05 | 0.1 |
| 905505 | 62 | 88 | 2.2 | 21.1 | 0.05 | 0.1 |
| 905511 | 303 | 159 | 2.2 | 20.3 | 0.05 | 0.1 |
| 905521 | 120 | 117 | 2.5 | 22.0 | 0.06 | 0.1 |
| 905633 | 31 | 40 | 2.5 | 23.1 | 0.06 | 0.1 |
| 905758 | 68 | 92 | 2.3 | 19.0 | 0.04 | 0.1 |
| 905867 | 168 | 199 | 2.3 | 24.0 | 0.03 | 0.1 |

### Hematology Assays

[0364] Blood obtained from all mouse groups were sent to IDEXX BioResearch for hematocrit (HCT) measurements and analysis, as well as measurements of the various blood cells, such as WBC, RBC, lymphocytes, monocytes, and platelets. The results are presented in the tables below. ISIS oligonucleotides that caused changes in the levels of any of the hematology markers outside the expected range for antisense oligonucleotides were excluded in further studies.

TABLE 69
Hematology markers in CD1 mice

| | | LYM | MON | PLT | RBC | WBC |
|---|---|---|---|---|---|---|
| Compound | HCT | (10³/ | (10³/ | (10³/ | (10⁶/ | (10³/ |
| ID | (%) | μL) | μL) | μL) | μL) | μL) |
| PBS | 43 | 4.4 | 0.2 | 1225 | 9.3 | 5.5 |
| 793406 | 44 | 5.7 | 0.4 | 892 | 9.6 | 7.5 |
| 903853 | 44 | 5.9 | 0.4 | 673 | 9.1 | 7.4 |
| 904082 | 41 | 5.4 | 0.3 | 1009 | 9.0 | 6.5 |
| 904226 | 41 | 4.3 | 0.3 | 624 | 9.2 | 5.2 |
| 904627 | 44 | 3.8 | 0.5 | 764 | 9.3 | 6.1 |
| 904628 | 42 | 2.7 | 0.1 | 765 | 9.2 | 4.0 |
| 905032 | 38 | 2.3 | 0.2 | 861 | 8.1 | 3.1 |
| 905373 | 42 | 4.7 | 0.4 | 922 | 8.8 | 6.1 |
| 905505 | 39 | 4.4 | 0.3 | 1252 | 8.3 | 6.1 |
| 905511 | 44 | 7.0 | 0.7 | 858 | 9.2 | 9.9 |
| 905521 | 42 | 3.1 | 0.3 | 734 | 8.8 | 4.1 |
| 905633 | 44 | 3.6 | 0.3 | 853 | 9.4 | 4.6 |
| 905758 | 40 | 3.2 | 0.3 | 628 | 8.5 | 4.0 |
| 905867 | 40 | 5.0 | 0.5 | 833 | 8.6 | 7.3 |

### Study 2

### Plasma Chemistry Markers

[0365] To evaluate the effect of ISIS oligonucleotides on liver and kidney function, plasma levels of transaminases, bilirubin, creatinine, and BUN were measured using an automated clinical chemistry analyzer (Hitachi Olympus AU400e, Melville, N.Y.). The results are presented in the Table below. ISIS oligonucleotides that caused changes in the levels of any of the liver or kidney function markers outside the expected range for antisense oligonucleotides were excluded in further studies.

TABLE 70
Plasma chemistry markers in CD1 mice plasma at week 6

| | | | | | Creati- | |
|---|---|---|---|---|---|---|
| Compound | ALT | AST | Albumin | BUN | nine | T. Bil |
| ID | (IU/L) | (IU/L) | (g/dL) | (mg/dL) | (mg/dL) | (mg/dL) |
| PBS | 248 | 213 | 2.7 | 21.3 | 0.11 | 0.19 |
| 793444 | 51 | 73 | 2.4 | 23.4 | 0.11 | 0.14 |
| 903822 | 68 | 171 | 2.6 | 23.8 | 0.13 | 0.15 |
| 904101 | 39 | 62 | 2.5 | 19.5 | 0.10 | 0.15 |
| 904619 | 590 | 466 | 2.1 | 17.2 | 0.06 | 0.14 |
| 904763 | 90 | 87 | 2.5 | 24.0 | 0.08 | 0.16 |
| 904766 | 297 | 262 | 2.3 | 19.3 | 0.07 | 0.16 |
| 905095 | 246 | 294 | 2.2 | 18.5 | 0.07 | 0.19 |
| 905139 | 92 | 95 | 2.4 | 18.3 | 0.09 | 0.16 |
| 905469 | 60 | 72 | 2.5 | 19.1 | 0.10 | 0.17 |
| 905491 | 972 | 989 | 1.9 | 22.4 | 0.06 | 0.20 |
| 905634 | 42 | 71 | 2.3 | 17.1 | 0.08 | 0.13 |
| 905665 | 182 | 118 | 2.1 | 20.8 | 0.07 | 0.13 |

### Hematology Assays

[0366] Blood obtained from all mouse groups were sent to IDEXX BioResearch for hematocrit (HCT) measurements and analysis, as well as measurements of the various blood cells, such as WBC, RBC, lymphocytes, monocytes, and platelets. The results are presented in the tables below. ISIS oligonucleotides that caused changes in the levels of any of the hematology markers outside the expected range for antisense oligonucleotides were excluded in further studies.

TABLE 71
Hematology markers in CD1 mice

| | | LYM | MON | PLT | RBC | WBC |
|---|---|---|---|---|---|---|
| Compound | HCT | (10³/ | (10³/ | (10³/ | (10⁶/ | (10³/ |
| ID | (%) | μL) | μL) | μL) | μL) | μL) |
| PBS | 50 | 2.8 | 0.3 | 824 | 10.7 | 6.2 |
| 793444 | 46 | 3.0 | 0.2 | 831 | 10.5 | 4.0 |
| 903822 | 44 | 4.0 | 0.2 | 525 | 10.1 | 5.4 |
| 904101 | 47 | 7.7 | 0.9 | 733 | 10.3 | 10.9 |
| 904619 | 42 | 21.0 | 1.2 | 686 | 9.5 | 26.5 |
| 904763 | 49 | 3.5 | 0.2 | 950 | 11.2 | 4.3 |
| 904766 | 51 | 7.9 | 0.9 | 603 | 11.5 | 10.3 |
| 905095 | 46 | 8.2 | 0.7 | 645 | 10.2 | 11.2 |
| 905139 | 49 | 4.2 | 0.4 | 997 | 10.7 | 6.2 |
| 905469 | 52 | 4.2 | 0.2 | 614 | 11.8 | 5.4 |
| 905491 | 43 | 7.8 | 2.4 | 495 | 9.6 | 23.1 |
| 905634 | 43 | 3.2 | 0.3 | 716 | 9.6 | 4.2 |
| 905665 | 41 | 4.7 | 0.3 | 686 | 8.6 | 6.6 |

### Study 3

### Body and Organ Weights

[0367] To evaluate the effect of ISIS oligonucleotides on animal health, body and organ weights measured at the end of the study. The results are presented in the Table below. ISIS oligonucleotides that caused changes in the levels of any of the weights outside the expected range for antisense oligonucleotides were excluded in further studies.

TABLE 72
Body and organ weights of CD1
mice plasma at week 6

| | | | | Body |
|---|---|---|---|---|
| | Liver | Kidney | Spleen | weight |
| PBS | 2.1 | 0.6 | 0.1 | 41.6 |
| 969157 | 2.4 | 0.6 | 0.2 | 39.0 |
| 969160 | 2.2 | 0.5 | 0.2 | 36.7 |
| 969162 | 2.2 | 0.6 | 0.2 | 40.8 |
| 969210 | 2.2 | 0.6 | 0.2 | 41.0 |
| 969214 | 2.1 | 0.6 | 0.2 | 41.0 |
| 969361 | 2.2 | 0.5 | 0.2 | 40.3 |
| 969408 | 2.4 | 0.6 | 0.2 | 42.4 |
| 969433 | 2.6 | 0.6 | 0.2 | 43.3 |
| 969437 | 2.5 | 0.6 | 0.2 | 41.3 |
| 969502 | 2.4 | 0.6 | 0.2 | 37.9 |
| 971925 | 2.5 | 0.7 | 0.2 | 41.5 |
| 971997 | 2.2 | 0.5 | 0.1 | 40.1 |
| 972002 | 2.7 | 0.5 | 0.2 | 40.4 |
| 972116 | 2.1 | 0.5 | 0.2 | 38.8 |
| 972139 | 2.4 | 0.5 | 0.2 | 40.3 |
| 972163 | 2.1 | 0.5 | 0.2 | 41.1 |
| 972190 | 2.3 | 0.6 | 0.1 | 41.0 |
| 972268 | 3.1 | 0.6 | 0.3 | 46.0 |

### Plasma Chemistry Markers

[0368] To evaluate the effect of ISIS oligonucleotides on liver and kidney function, plasma levels of transaminases, albumin, bilirubin, creatinine, and BUN were measured using an automated clinical chemistry analyzer (Beckman Coulter AU480, Brea, Calif.). The results are presented in the Table below. ISIS oligonucleotides that caused changes in the levels of any of the liver or kidney function markers outside the expected range for antisense oligonucleotides were excluded in further studies.

TABLE 73
Plasma chemistry markers in CD1 mice plasma at week 6

| | | | | | Creati- | |
|---|---|---|---|---|---|---|
| | ALT | AST | Albumin | BUN | nine | T. Bil |
| | (IU/L) | (IU/L) | (g/dL) | (mg/dL) | (mg/dL) | (mg/dL) |
| PBS | 31 | 77 | 3.1 | 26.4 | 0.2 | 0.2 |
| 969157 | 818 | 1083 | 2.9 | 23.2 | 0.2 | 0.3 |
| 969160 | 482 | 715 | 2.8 | 22.4 | 0.2 | 0.2 |
| 969162 | 68 | 141 | 2.6 | 21.5 | 0.1 | 0.2 |
| 969210 | 87 | 166 | 2.6 | 25.5 | 0.2 | 0.2 |
| 969214 | 456 | 502 | 2.6 | 23.9 | 0.1 | 0.2 |
| 969361 | 70 | 147 | 2.8 | 23.0 | 0.1 | 0.2 |
| 969408 | 76 | 138 | 2.6 | 23.3 | 0.1 | 0.1 |
| 969433 | 84 | 136 | 2.6 | 20.0 | 0.1 | 0.2 |
| 969437 | 240 | 281 | 2.4 | 21.5 | 0.1 | 0.1 |
| 969502 | 184 | 217 | 2.7 | 23.1 | 0.1 | 0.1 |
| 971925 | 114 | 168 | 2.8 | 23.6 | 0.1 | 0.2 |
| 971997 | 52 | 101 | 2.9 | 22.1 | 0.1 | 0.1 |
| 972002 | 147 | 192 | 2.5 | 21.2 | 0.1 | 0.1 |
| 972116 | 75 | 107 | 3.0 | 21.1 | 0.1 | 0.1 |
| 972139 | 61 | 115 | 2.7 | 22.2 | 0.1 | 0.1 |
| 972163 | 86 | 124 | 3.0 | 20.4 | 0.1 | 0.2 |
| 972190 | 70 | 93 | 2.8 | 20.5 | 0.1 | 0.2 |
| 972268 | 41 | 79 | 2.6 | 19.1 | 0.1 | 0.1 |

### Hematology Assays

[0369] Blood obtained from all mouse groups were sent to IDEXX BioResearch for hematocrit (HCT) measurements and analysis, as well as measurements of the various blood cells, such as WBC, RBC, lymphocytes, monocytes, and platelets. The results are presented in the tables below. ISIS oligonucleotides that caused changes in the levels of any of the hematology markers outside the expected range for antisense oligonucleotides were excluded in further studies.

TABLE 74
Hematology markers in CD1 mice

| | | | | | | Platelet | | |
|---|---|---|---|---|---|---|---|---|
| | Neutrophil | WBC | RBC | Lymphocytes | HCT | Count | Lymphocytes | Monocytes |
| | (%) | (K/μL) | (M/μL) | (%) | (%) | (K/μL) | (/μL) | (/μL) |
| PBS | 16 | 4 | 10 | 54 | 47 | 1152 | 2185 | 144 |
| 969157 | 23 | 6 | 10 | 65 | 48 | 1338 | 4078 | 543 |
| 969160 | 20 | 13 | 10 | 69 | 46 | 974 | 7953 | 1425 |
| 696162 | 16 | 8 | 10 | 74 | 46 | 1002 | 6067 | 641 |
| 969210 | 20 | 7 | 10 | 70 | 48 | 920 | 5322 | 524 |
| 969214 | 17 | 5 | 10 | 69 | 44 | 1076 | 3781 | 687 |
| 969361 | 16 | 9 | 9 | 75 | 43 | 931 | 6617 | 599 |
| 969408 | 35 | 7 | 9 | 58 | 42 | 1069 | 4416 | 506 |
| 969433 | 25 | 6 | 10 | 70 | 46 | 1054 | 3900 | 182 |
| 969437 | 23 | 7 | 11 | 69 | 47 | 1316 | 4780 | 526 |
| 969502 | 14 | 8 | 10 | 75 | 44 | 1075 | 5845 | 651 |
| 971925 | 18 | 5 | 10 | 74 | 44 | 961 | 3529 | 312 |
| 971997 | 18 | 4 | 9 | 73 | 43 | 1216 | 2646 | 239 |
| 972002 | 27 | 7 | 9 | 67 | 41 | 1069 | 4781 | 286 |
| 972116 | 23 | 6 | 10 | 69 | 44 | 1141 | 4415 | 336 |
| 972139 | 19 | 5 | 9 | 77 | 37 | 877 | 3947 | 224 |
| 972163 | 10 | 6 | 10 | 81 | 43 | 925 | 5197 | 437 |
| 972190 | 15 | 7 | 10 | 77 | 47 | 1453 | 5281 | 400 |
| 972268 | 39 | 7 | 10 | 54 | 46 | 1468 | 3891 | 406 |

### Example 6: Tolerability of Modified Oligonucleotides Targeted to hAPOL1 in Sprague-Dawley Rats

[0370] Sprague-Dawley rats are a multipurpose model used for safety and efficacy evaluations. The rats were treated with 3-10-3 cEt gapmer oligonucleotides from the studies described in the Examples above and evaluated for changes in the levels of various plasma chemistry markers.

### Treatment

[0371] Male Sprague-Dawley rats were maintained on a 12-hour light/dark cycle and fed ad libitum with Purina normal rat chow, diet 5001. Groups of 4 Sprague-Dawley rats each were injected subcutaneously once a week for 6 weeks with 50 mg/kg of ISIS oligonucleotide. Forty-eight hours after the last dose, rats were euthanized and organs and plasma were harvested for further analysis. Two separate studies were conducted with similar conditions.

### Study 1

### Liver Function

[0372] To evaluate the effect of ISIS oligonucleotides on hepatic function, plasma levels of transaminases were measured using an automated clinical chemistry analyzer (Hitachi Olympus AU400e, Melville, N.Y.). Plasma levels of ALT (alanine transaminase) and AST (aspartate transaminase) were measured and the results are presented in the Table below expressed in IU/L. ISIS oligonucleotides that caused changes in the levels of any markers of liver function outside the expected range for antisense oligonucleotides were excluded in further studies.

TABLE 75
Liver function markers in Sprague-Dawley rats

| Compound | ALT | AST |
|---|---|---|
| ID | (IU/L) | (IU/L) |
| PBS | 45 | 66 |
| 793406 | 31 | 56 |
| 904082 | 67 | 114 |
| 904226 | 125 | 251 |
| 904628 | 42 | 87 |
| 905032 | 195 | 293 |
| 905373 | 54 | 90 |
| 905505 | 66 | 94 |
| 905521 | 41 | 67 |
| 905633 | 83 | 114 |
| 905758 | 85 | 144 |

### Kidney Function

[0373] To evaluate the effect of ISIS oligonucleotides on kidney function, plasma levels of blood urea nitrogen (BUN) and creatinine were measured using an automated clinical chemistry analyzer (Hitachi Olympus AU400e, Melville, N.Y.). Results are presented in the Table below, expressed in mg/dL. ISIS oligonucleotides that caused changes in the levels of any of the kidney function markers outside the expected range for antisense oligonucleotides were excluded in further studies.

TABLE 76
Kidney function markers in Sprague-Dawley rats

| Compound | Albumin | BUN | Creatinine | T.Bil |
|---|---|---|---|---|
| ID | (g/dL) | (mg/dL) | (mg/dL) | (mg/dL) |
| PBS | 3.7 | 16.0 | 0.3 | 0.2 |
| 793406 | 2.9 | 23.1 | 0.4 | 0.2 |
| 904082 | 4.0 | 27.0 | 0.4 | 0.2 |
| 904226 | 2.8 | 26.6 | 0.4 | 0.2 |
| 904628 | 3.2 | 18.9 | 0.4 | 0.1 |
| 905032 | 3.5 | 21.0 | 0.5 | 0.2 |
| 905373 | 3.1 | 19.9 | 0.4 | 0.1 |
| 905505 | 3.4 | 18.2 | 0.4 | 0.2 |
| 905521 | 1.9 | 78.0 | 1.1 | 0.1 |
| 905633 | 3.3 | 20.6 | 0.4 | 0.1 |
| 905758 | 3.1 | 37.5 | 0.4 | 0.2 |

### Hematology Assays

[0374] Blood obtained from all rat groups were sent to Antech Diagnostics for hematocrit (HCT) measurements and analysis, as well as measurements of the various blood cells, such as WBC, RBC, and total hemoglobin content. The results are presented in the Table below. ISIS oligonucleotides that caused changes in the levels of any of the hematology markers outside the expected range for antisense oligonucleotides were excluded in further studies.

TABLE 77
Hematology markers in Sprague-Dawley rats

| | | LYM | MON | EOS | | | RET |
|---|---|---|---|---|---|---|---|
| Compound | HCT | (10³/ | (10³/ | (10³/ | BAS | NEU | (10³/ |
| ID | (%) | μL) | μL) | μL) | (10^{3/L)} | (10^{3/L)} | L) |
| PBS | 51 | 9 | 0.5 | 88 | 15 | 1.2 | 263 |
| 793406 | 47 | 14 | 2.1 | 101 | 53 | 3.3 | 156 |
| 904226 | 33 | 11 | 1.4 | 0 | 54 | 0.6 | 99 |
| 904628 | 42 | 21 | 3.0 | 18 | 167 | 1.3 | 176 |
| 905032 | 48 | 19 | 1.7 | 54 | 56 | 1.2 | 112 |
| 905373 | 43 | 19 | 1.4 | 18 | 49 | 0.9 | 216 |
| 905505 | 46 | 13 | 1.3 | 15 | 58 | 0.6 | 119 |
| 905521 | 44 | 11 | 1.3 | 17 | 24 | 2.5 | 37 |
| 905633 | 47 | 8 | 0.8 | 55 | 17 | 0.8 | 149 |
| 905758 | 50 | 24 | 3.7 | 37 | 74 | 2.1 | 128 |

TABLE 78
Hematology markers in Sprague-Dawley rats

| | | | | PLT | | RBC | WBC |
|---|---|---|---|---|---|---|---|
| Compound | MCH | MCHC | MCV | (10³/ | | (10⁶/ | (10³/ |
| ID | (pg) | (g/dL) | (fL) | μL) | HGB | μL) | μL) |
| PBS | 19 | 32 | 59 | 747 | 16 | 9 | 11 |
| 793406 | 18 | 33 | 55 | 625 | 15 | 9 | 20 |
| 904226 | 18 | 33 | 55 | 145 | 11 | 6 | 13 |
| 904628 | 18 | 32 | 55 | 220 | 13 | 8 | 26 |
| 905032 | 18 | 33 | 54 | 684 | 16 | 9 | 22 |
| 905373 | 17 | 32 | 55 | 619 | 14 | 8 | 21 |
| 905505 | 18 | 33 | 55 | 590 | 15 | 9 | 15 |
| 905521 | 17 | 34 | 52 | 799 | 15 | 9 | 15 |
| 905633 | 19 | 34 | 54 | 658 | 16 | 9 | 10 |
| 905758 | 18 | 33 | 53 | 559 | 17 | 10 | 30 |

### Organ Weights

[0375] Liver, spleen and kidney weights were measured at the end of the study, and are presented in the Table below. ISIS oligonucleotides that caused any changes in organ weights outside the expected range for antisense oligonucleotides were excluded from further studies.

TABLE 79
Organ weights (g)

| Compound | Liver | Kidney | Spleen |
|---|---|---|---|
| ID | (g) | (g) | (g) |
| PBS | 14.8 | 2.7 | 0.8 |
| 793406 | 13.5 | 2.5 | 1.0 |
| 904082 | 13.8 | 3.6 | 1.7 |
| 904226 | 13.4 | 3.2 | 2.2 |
| 904628 | 15.6 | 2.7 | 3.2 |
| 905032 | 10.6 | 2.6 | 1.2 |
| 905373 | 14.7 | 2.4 | 1.9 |
| 905505 | 14.0 | 2.6 | 1.5 |
| 905521 | 11.7 | 3.4 | 0.8 |
| 905633 | 13.3 | 2.3 | 1.2 |
| 905758 | 12.9 | 2.7 | 2.1 |

### Study 2

### Liver Function

[0376] To evaluate the effect of ISIS oligonucleotides on hepatic function, plasma levels of transaminases were measured using an automated clinical chemistry analyzer (Hitachi Olympus AU400e, Melville, N.Y.). Plasma levels of ALT (alanine transaminase) and AST (aspartate transaminase) were measured and the results are presented in the Table below expressed in IU/L. ISIS oligonucleotides that caused changes in the levels of any markers of liver function outside the expected range for antisense oligonucleotides were excluded in further studies.

TABLE 80
Liver function markers in Sprague-Dawley rats

| Compound | ALT | AST |
|---|---|---|
| ID | (IU/L) | (IU/L) |
| PBS | 44 | 65 |
| 793444 | 59 | 89 |
| 903822 | 46 | 148 |
| 904101 | 55 | 89 |
| 904763 | 66 | 96 |
| 905139 | 212 | 447 |
| 905469 | 41 | 78 |
| 905634 | 135 | 112 |
| 905665 | 82 | 105 |

### Kidney Function

[0377] To evaluate the effect of ISIS oligonucleotides on kidney function, plasma levels of blood urea nitrogen (BUN) and creatinine were measured using an automated clinical chemistry analyzer (Hitachi Olympus AU400e, Melville, N.Y.). Results are presented in the Table below, expressed in mg/dL. ISIS oligonucleotides that caused changes in the levels of any of the kidney function markers outside the expected range for antisense oligonucleotides were excluded in further studies.

TABLE 81
Kidney function markers in Sprague-Dawley rats

| Compound | Albumin | BUN | Creatinine | T.Bil |
|---|---|---|---|---|
| ID | (g/dL) | (mg/dL) | (mg/dL) | (mg/dL) |
| PBS | 3.5 | 17.5 | 0.3 | 0.2 |
| 793444 | 3.3 | 18.7 | 0.3 | 0.2 |
| 903822 | 3.0 | 16.7 | 0.3 | 0.3 |
| 904101 | 3.5 | 21.4 | 0.4 | 0.2 |
| 904763 | 3.4 | 19.1 | 0.4 | 0.2 |
| 905139 | 4.0 | 21.0 | 0.4 | 2.5 |
| 905469 | 3.4 | 16.7 | 0.3 | 0.1 |
| 905634 | 3.5 | 19.3 | 0.4 | 0.2 |
| 905665 | 2.9 | 20.0 | 0.4 | 0.2 |

### Hematology Assays

[0378] Blood obtained from all rat groups were sent to Antech Diagnostics for hematocrit (HCT) measurements and analysis, as well as measurements of the various blood cells, such as WBC, RBC, and total hemoglobin content. The results are presented in the Table below. ISIS oligonucleotides that caused changes in the levels of any of the hematology markers outside the expected range for antisense oligonucleotides were excluded in further studies. N.d. indicates that the parameter was not measured for that particular oligonucleotide.

TABLE 82
Hematology markers in Sprague-Dawley rats

| | | | Lympho- | | Mono- | Platelet |
|---|---|---|---|---|---|---|
| Compound | WBC | RBC | cyte | HCT | cyte | Count |
| ID | (K/μL) | (M/μL) | (/μL) | (%) | (/μL) | (K/μL) |
| PBS | 11 | 8.4 | 7781 | 53 | 30 | 687 |
| 793444 | 16 | 9.5 | n.d. | 55 | n.d. | 559 |
| 903822 | 13 | 6.5 | 12446 | 40 | 462 | 670 |
| 904101 | 13 | 8.7 | 11510 | 51 | 35 | 680 |
| 904763 | 10 | 8.3 | 8612 | 49 | n.d. | 785 |
| 905139 | 20 | 7.9 | 14922 | 46 | 274 | 769 |
| 905469 | 12 | 7.8 | n.d. | 49 | n.d. | 592 |
| 905634 | 12 | 8.6 | 10853 | 51 | 0 | 668 |
| 905665 | 13 | 9.1 | 6794 | 56 | 79 | 814 |

### Organ Weights

[0379] Liver, spleen and kidney weights were measured at the end of the study, and are presented in the Table below. ISIS oligonucleotides that caused any changes in organ weights outside the expected range for antisense oligonucleotides were excluded from further studies.

TABLE 83
Organ weights (g)

| Compound | Liver | Kidney | Spleen |
|---|---|---|---|
| ID | (g) | (g) | (g) |
| PBS | 18.7 | 3.0 | 0.9 |
| 793444 | 13.4 | 2.7 | 1.0 |
| 903822 | 16.0 | 3.2 | 2.9 |
| 904101 | 16.6 | 2.9 | 1.4 |
| 904763 | 18.0 | 2.6 | 1.2 |
| 905139 | 16.9 | 3.4 | 1.9 |
| 905469 | 18.4 | 2.9 | 1.9 |
| 905634 | 20.3 | 2.8 | 1.4 |
| 905665 | 16.5 | 3.0 | 1.4 |

### Study 3

### Liver Function

[0380] To evaluate the effect of ISIS oligonucleotides on hepatic function, plasma levels of transaminases were measured using an automated clinical chemistry analyzer (Hitachi Olympus AU400e, Melville, N.Y.). Plasma levels of ALT (alanine transaminase) and AST (aspartate transaminase) were measured and the results are presented in the Table below expressed in IU/L. ISIS oligonucleotides that caused changes in the levels of any markers of liver function outside the expected range for antisense oligonucleotides were excluded in further studies.

TABLE 84
Liver function markers in Sprague-Dawley rats

| | ALT | AST | Bilirubin |
|---|---|---|---|
| | (IU/L) | (IU/L) | (mg/dL) |
| PBS | 34 | 58 | 0.2 |
| 969162 | 41 | 119 | 0.2 |
| 972139 | 35 | 94 | 0.2 |
| 972002 | 41 | 83 | 0.2 |
| 972163 | 37 | 81 | 0.2 |
| 972116 | 31 | 59 | 0.1 |
| 972190 | 62 | 93 | 0.1 |
| 972268 | 336 | 286 | 0.8 |
| 969408 | 104 | 132 | 0.2 |
| 969361 | 240 | 386 | 0.4 |
| 969433 | 31 | 99 | 0.1 |
| 971997 | 50 | 84 | 0.2 |
| 969210 | 32 | 87 | 0.2 |

### Kidney Function

[0381] To evaluate the effect of ISIS oligonucleotides on kidney function, plasma levels of blood urea nitrogen (BUN) and creatinine were measured using an automated clinical chemistry analyzer (Hitachi Olympus AU400e, Melville, N.Y.). Results are presented in the Table below, expressed in mg/dL. ISIS oligonucleotides that caused changes in the levels of any of the kidney function markers outside the expected range for antisense oligonucleotides were excluded in further studies.

TABLE 85
Plasma levels for kidney markers in Sprague-Dawley rats

| | BUN | Creatinine | Albumin |
|---|---|---|---|
| | (mg/dL) | (mg/dL) | (g/dL) |
| PBS | 17 | 0.2 | 3.3 |
| 969162 | 21 | 0.3 | 2.8 |
| 972139 | 67 | 0.8 | 2.8 |
| 972002 | 23 | 0.3 | 2.7 |
| 972163 | 19 | 0.3 | 2.9 |
| 972116 | 19 | 0.3 | 2.9 |
| 972190 | 19 | 0.3 | 3.0 |
| 972268 | 16 | 0.3 | 3.0 |
| 969408 | 19 | 0.3 | 3.2 |
| 969361 | 24 | 0.4 | 2.8 |
| 969433 | 21 | 0.3 | 2.7 |
| 971997 | 21 | 0.3 | 2.9 |
| 969210 | 19 | 0.3 | 3.1 |

TABLE 86
Urine levels for kidney markers in Sprague-Dawley rats

| | Creatinine | Protein | Protein/Creatinine |
|---|---|---|---|
| | (mg/dL) | (mg/dL) | ratio |
| PBS | 121 | 113 | 1.0 |
| 969162 | 101 | 452 | 4.2 |
| 972139 | 61 | 283 | 4.0 |
| 972002 | 110 | 895 | 7.4 |
| 972163 | 96 | 394 | 4.0 |
| 972116 | 105 | 405 | 3.8 |
| 972190 | 109 | 261 | 2.4 |
| 972268 | 52 | 214 | 4.1 |
| 969408 | 51 | 147 | 3.0 |
| 969361 | 48 | 255 | 5.2 |
| 969433 | 51 | 224 | 4.3 |
| 971997 | 67 | 268 | 4.3 |
| 969210 | 86 | 338 | 3.9 |

### Hematology Assays

[0382] Blood obtained from all rat groups were sent to Antech Diagnostics for hematocrit (HCT) measurements and analysis, as well as measurements of the various blood cells, such as WBC, RBC, and total hemoglobin content. The results are presented in the Table below. ISIS oligonucleotides that caused changes in the levels of any of the hematology markers outside the expected range for antisense oligonucleotides were excluded in further studies. N.d. indicates that the parameter was not measured for that particular oligonucleotide.

TABLE 87
Hematology markers in Sprague-Dawley rats

| | | | Lympho- | | Mono- | Platelet |
|---|---|---|---|---|---|---|
| Compound | WBC | RBC | cyte | HCT | cyte | Count |
| ID | (K/μL) | (M/μL) | (/μL) | (%) | (/μL) | (K/μL) |
| PBS | 8 | 9 | 7035 | 51 | 252 | 725 |
| 969162 | 23 | 6 | 20273 | 36 | 2219 | 144 |
| 972139 | 20 | 6 | 16184 | 34 | 2500 | 427 |
| 972002 | 18 | 7 | 13972 | 43 | 1946 | 547 |
| 972163 | 25 | 8 | 22377 | 43 | 2302 | 556 |
| 972116 | 26 | 7 | 22581 | 42 | 1973 | 325 |
| 972190 | 9 | 8 | 8171 | 48 | 791 | 703 |
| 972268 | 20 | 8 | 16780 | 48 | 2237 | 737 |
| 969408 | 15 | 8 | 11733 | 46 | 1840 | 685 |
| 969361 | 32 | 7 | 25970 | 43 | 4802 | 230 |
| 969433 | 22 | 5 | 17649 | 31 | 2434 | 112 |
| 971997 | 24 | 7 | 20272 | 38 | 2077 | 458 |
| 969210 | 34 | 6 | 27724 | 37 | 3880 | 294 |

### Organ Weights

[0383] Liver, spleen and kidney weights, as well as body weights, were measured at the end of the study, and are presented in the Table below. ISIS oligonucleotides that caused any changes in weights outside the expected range for antisense oligonucleotides were excluded from further studies.

TABLE 88
Weights (g)

| | Liver | Kidney | Spleen | BW |
|---|---|---|---|---|
| PBS | 17 | 3.1 | 0.8 | 412 |
| 969162 | 17 | 3.3 | 3.3 | 358 |
| 972139 | 16 | 4.5 | 2.8 | 322 |
| 972002 | 24 | 3.8 | 2.5 | 365 |
| 972163 | 16 | 3.1 | 2.2 | 351 |
| 972116 | 17 | 3.5 | 2.8 | 357 |
| 972190 | 16 | 3.0 | 1.4 | 342 |
| 972268 | 17 | 2.9 | 1.4 | 355 |
| 969408 | 15 | 2.6 | 1.4 | 359 |
| 969361 | 17 | 2.6 | 2.9 | 344 |
| 969433 | 20 | 4.0 | 4.1 | 365 |
| 971997 | 16 | 2.6 | 2.3 | 355 |
| 969210 | 16 | 3.5 | 2.7 | 378 |

### Example 7: Dose-Dependent Inhibition of hAPOL1 in Transgenic Mouse Model

[0384] Transgenic mice hAPOL1 mice, described above, were maintained on a 12-hour light/dark cycle and were fed ad libitum normal Purina mouse chow. Animals were acclimated for at least 7 days in the research facility before initiation of the experiment. Antisense oligonucleotides (ASOs) were prepared in buffered saline (PBS) and sterilized by filtering through a 0.2 micron filter. Oligonucleotides were dissolved in 0.9% PBS for injection.

### Study 1

[0385] The hAPOL1 transgenic mice were divided into groups of 4 mice each. Groups received subcutaneous injections of 3-10-3 cEt gapmers at a dose of 5, 15, or 50 mg/kg once a week for four weeks, 4 total doses, as indicated in the tables below. One group of mice received subcutaneous injections of PBS once a week for 4 weeks. The saline-injected group served as the control group to which oligonucleotide-treated groups were compared.

### RNA Analysis

[0386] Mice were sacrificed 48 hours after the last dose and RNA was extracted from kidney and liver for real-time PCR analysis of measurement of mRNA expression of hAPOL1. Results are presented as percent change of mRNA, relative to PBS control, normalized with RIBOGREEN®. Two separate experiments were conducted with similar conditions and are presented in separate tables. As shown in the tables below, treatment with antisense oligonucleotides resulted in significant reduction of hAPO1 mRNA in comparison to the PBS control.

TABLE 89
Percent inhibition hAPOL1 mRNA in the transgenic
mouse kidney relative to the PBS control
(experiment 1)

| Weekly | | | | |
|---|---|---|---|---|
| Dose | | | | |
| Compound | 5 mg/kg | 15 mg/kg | 50 mg/kg | ED₅₀ |
| ID | % Inhibition hAPOL1 | | | (mg/kg/week) |
| 793406 | 0 | 20 | 35 | >50 |
| 793444 | 6 | 17 | 38 | >50 |
| 903822 | 1 | 21 | 32 | >50 |
| 904101 | 0 | 0 | 17 | >50 |
| 904763 | 7 | 20 | 49 | >50 |
| 905139 | 0 | 21 | 35 | >50 |
| 905469 | 11 | 25 | 50 | >50 |
| 905634 | 0 | 0 | 39 | >50 |
| 905665 | 0 | 23 | 39 | >50 |

TABLE 90
Percent inhibition hAPOL1 mRNA in the transgenic
mouse liver relative to the PBS control
(experiment 2)

| Weekly | | | | |
|---|---|---|---|---|
| Dose | | | | |
| Compound | 5 mg/kg | 15 mg/kg | 50 mg/kg | ED₅₀ |
| ID | % Inhibition hAPOL | | | (mg/kg/week) |
| 793406 | 6 | 68 | 92 | 11.8 |
| 793444 | 9 | 29 | 73 | 26.5 |
| 903822 | 24 | 78 | 95 | 8.5 |
| 904101 | 0 | 19 | 70 | 32.8 |
| 904763 | 36 | 83 | 92 | 6.8 |
| 905139 | 39 | 73 | 93 | 7.0 |
| 905469 | 39 | 75 | 96 | 9.3 |
| 905634 | 13 | 72 | 93 | 9.3 |
| 905665 | 2 | 71 | 92 | 10.5 |

### Study 2

[0387] The hAPOL1 transgenic mice were divided into groups of 4 mice each. Groups received subcutaneous injections of 3-10-3 cEt gapmers at a dose of 5, 15, or 50 mg/kg once a week for four weeks, 4 total doses, as indicated in the tables below. One group of mice received subcutaneous injections of PBS once a week for 4 weeks. The saline-injected group served as the control group to which oligonucleotide-treated groups were compared.

### RNA Analysis

[0388] Mice were sacrificed 48 hours after the last dose and RNA was extracted from kidney and liver for real-time PCR analysis of measurement of mRNA expression of hAPOL1. Results are presented as percent change of mRNA, relative to PBS control, normalized with RIBOGREEN©. Two separate experiments were conducted with similar conditions and are presented in separate tables. As shown in the tables below, treatment with antisense oligonucleotides resulted in significant reduction of hAPO1 mRNA in comparison to the PBS control.

TABLE 91
Percent inhibition hAPOL1 mRNA in the transgenic
mouse kidney relative to the PBS control
(experiment 1)

| Weekly | | | | |
|---|---|---|---|---|
| Dose | | | | |
| Compound | 5 mg/kg | 15 mg/kg | 50 mg/kg | ED50 |
| ID | % Inhibition hAPOL1 | | | (mg/kg/week) |
| 793406 | 22 | 42 | 51 | 40.6 |
| 904082 | 33 | 50 | 61 | 18.1 |
| 904226 | 17 | 36 | 59 | 31.7 |
| 904628 | 33 | 41 | 50 | >50 |
| 905032 | 22 | 15 | 45 | >50 |
| 905373 | 26 | 50 | 35 | >50 |
| 905505 | 22 | 52 | 57 | 23.6 |
| 905521 | 25 | 46 | 53 | 21.4 |
| 905633 | 18 | 16 | 48 | >50 |
| 905758 | 27 | 27 | 49 | >50 |

TABLE 92
Percent inhibition hAPOL1 mRNA in the transgenic
mouse liver relative to the PBS control
(experiment 2)

| Weekly | | | | |
|---|---|---|---|---|
| Dose | | | | |
| Compound | 5 mg/kg | 15 mg/kg | 50 mg/kg | ED₅₀ |
| ID | % Inhibition hAPOL1 | | | (mg/kg/week) |
| 793406 | 19 | 60 | 94 | 11.7 |
| 904082 | 54 | 81 | 94 | 4.4 |
| 904226 | 32 | 73 | 96 | 8.0 |
| 904628 | 57 | 70 | 91 | 3.7 |
| 905032 | 65 | 92 | 96 | 3.3 |
| 905373 | 39 | 84 | 35 | >50 |
| 905505 | 28 | 83 | 92 | 7.6 |
| 905521 | 0 | 68 | 95 | 12.3 |
| 905633 | 0 | 18 | 79 | 21.9 |
| 905758 | 0 | 60 | 81 | 11.8 |

### Study 3

[0389] The hAPOL1 transgenic mice were divided into groups of 4 mice each. Groups received subcutaneous injections of modified oligonucleotide at a dose of 1.5, 5, 15, or 50 mg/kg once a week for four weeks, 4 total doses, as indicated in the tables below. One group of mice received subcutaneous injections of PBS once a week for 4 weeks. The saline-injected group served as the control group to which oligonucleotide-treated groups were compared.

### RNA Analysis

[0390] Mice were sacrificed 48 hours after the last dose and RNA was extracted from kidney and liver for real-time PCR analysis of measurement of mRNA expression of hAPOL1. Results are presented as percent change of mRNA, relative to PBS control, normalized with RIBOGREEN©. As shown in the tables below, treatment with antisense oligonucleotides resulted in significant reduction of hAPO1 mRNA in comparison to the PBS control.

TABLE 93
Percent inhibition hAPOL1 mRNA in the transgenic
mouse kidney relative to the PBS control

| Weekly | | | | | |
|---|---|---|---|---|---|
| Dose | | 5 | 15 | 50 | |
| Compound | 1.5 | mg/kg | mg/kg | mg/kg | ED₄₀ |
| ID | mg/kg | % Inhibition hAPOL1 | | | (mg/kg/week) |
| 793406 | 0 | 33 | 43 | 60 | 13.7 |
| 904763 | 19 | 29 | 52 | 62 | 9.3 |
| 905469 | 20 | 26 | 34 | 59 | 15.9 |
| 905505 | 28 | 23 | 45 | 47 | >50 |
| 905634 | 9 | 16 | 27 | 45 | >50 |
| 905665 | 12 | 30 | 45 | 56 | 13.2 |
| 972163 | 0 | 32 | 45 | 60 | 13.5 |
| 972190 | 13 | 27 | 46 | 57 | 13.1 |

TABLE 94
Percent inhibition hAPOL1 mRNA in the transgenic mouse
liver relative to the PBS control

| Weekly | | | | | |
|---|---|---|---|---|---|
| Dose | | | | | |
| Compound | 1.5 mg/kg | 5 mg/kg | 15 mg/kg | 50 mg/kg | ED₅₀ |
| ID | % Inhibition hAPOL1 | | | | (mg/kg/week) |
| 793406 | 4 | 58 | 61 | 96 | 6.4 |
| 904763 | 17 | 42 | 72 | 93 | 5.4 |
| 905469 | 31 | 37 | 61 | 96 | 7.0 |
| 905505 | 15 | 45 | 78 | 95 | 5.7 |
| 905634 | 2 | 32 | 48 | 72 | 15.8 |
| 905665 | 3 | 43 | 79 | 91 | 5.4 |
| 972163 | 14 | 60 | 85 | 93 | 4.2 |
| 972190 | 18 | 48 | 83 | 92 | 5.1 |

### Example 8: Confirmation of Dose-Dependent Antisense Inhibition of Human Lead Compounds Targeting APOL1 in A431 Cells

[0391] Gapmers selected from the studies described above were tested at various doses in A431 cells.

### Study 1

[0392] Cells were plated at a density of 10,000 cells per well and transfected free uptake with various concentrations of antisense oligonucleotides, as specified in the Table below. After a treatment period of approximately 16 hours, RNA was isolated from the cells and APOL1 mRNA levels were measured by quantitative real-time PCR. Human primer probe set RTS35962 was used to measure mRNA levels. APOL1 mRNA levels were adjusted according to total RNA content, as measured by RIBOGREEN©. Results are presented as percent inhibition of APOL1, relative to untreated control cells.

[0393] The half maximal inhibitory concentration (IC₅₀) of each oligonucleotide is also presented. APOL1 mRNA levels were significantly reduced in a dose-dependent manner in antisense oligonucleotide treated cells.

TABLE 95
Multi-dose assay with 3-10-3 cEt gapmers

| | % inhibition | | | | | |
|---|---|---|---|---|---|---|
| Compound | 8 | 40 | 200 | 1000 | 5000 | IC₅₀ |
| Number | nM | nM | nM | nM | nM | (μM) |
| 905505 | 22 | 69 | 92 | 97 | 97 | 0.02 |
| 905373 | 13 | 55 | 92 | 98 | 98 | 0.03 |
| 905634 | 10 | 41 | 86 | 97 | 98 | 0.05 |
| 793406 | 6 | 15 | 53 | 84 | 93 | 0.19 |
| 905633 | 21 | 68 | 94 | 98 | 98 | 0.02 |
| 904763 | 11 | 37 | 81 | 96 | 97 | 0.06 |

### Study 2

[0394] Cells were plated at a density of 10,000 cells per well and transfected free uptake with various concentrations of antisense oligonucleotides, as specified in the Table below. After a treatment period of approximately 16 hours, RNA was isolated from the cells and APOL1 mRNA levels were measured by quantitative real-time PCR. Human primer probe set RTS35962 was used to measure mRNA levels. APOL1 mRNA levels were adjusted according to total RNA content, as measured by RIBOGREEN©. Results are presented as percent inhibition of APOL1, relative to untreated control cells.

[0395] The half maximal inhibitory concentration (IC₅₀) of each oligonucleotide is also presented. APOL1 mRNA levels were significantly reduced in a dose-dependent manner in antisense oligonucleotide treated cells.

TABLE 96
Multi-dose assay to confirm lead compounds

| | | % inhibition | | | | | |
|---|---|---|---|---|---|---|---|
| Compound | | 8 | 40 | 200 | 1000 | 5000 | IC₅₀ |
| Number | Chemistry | nM | nM | nM | nM | nM | (μM) |
| 793406 | kkk-10-kkk | 4 | 11 | 41 | 72 | 88 | 0.34 |
| 904763 | kkk-10-kkk | 6 | 23 | 63 | 93 | 98 | 0.12 |
| 905469 | kkk-10-kkk | 9 | 15 | 48 | 81 | 94 | 0.22 |
| 905505 | kkk-10-kkk | 0 | 35 | 81 | 95 | 98 | 0.07 |
| 905634 | kkk-10-kkk | 7 | 18 | 59 | 86 | 93 | 0.15 |
| 905665 | kkk-10-kkk | 7 | 11 | 56 | 82 | 93 | 0.19 |
| 972163 | kkk-9-kkke | 2 | 36 | 85 | 95 | 95 | 0.06 |
| 972190 | kkk-9-kkke | 2 | 24 | 69 | 94 | 99 | 0.10 |

### Example 9: Effect of ISIS Antisense Oligonucleotides Targeting Human APOL1 in Cynomolgus Monkeys

[0396] Cynomolgus monkeys were treated with ISIS antisense oligonucleotides selected from studies described in the Examples above. Antisense oligonucleotide efficacy and tolerability, as well as their pharmacokinetic profile in the liver and kidney, were evaluated. Cynomolgus monkeys are reported to have an APOL1 pseudogene.

[0397] The human antisense oligonucleotides tested are cross-reactive with the cynomolgus genomic sequence (the complement of GENBANK Accession No. NC_022281.1 truncated from nucleotides 15021761 to 15036414, designated herein as SEQ ID NO: 1949). The greater the complementarity between the human oligonucleotide and the cynomolgus monkey sequence, the more likely the human oligonucleotide can cross-react with the cynomolgus monkey sequence. The start and stop sites of each oligonucleotide to SEQ ID NO: 1949 is presented in the Table below. “Start site” indicates the 5′-most nucleoside to which the gapmer is targeted in the cynomolgus monkey gene sequence. ‘Mismatches’ indicates the number of nucleobases of the human oligonucleotide that are mismatched with the cynomolgus gene sequence along its length.

TABLE 97
Antisense oligonucleotides complementary to the
cynomolgus APOL1 genomic sequence (SEQ ID NO: 1949)

| | Target | | | SEQ |
|---|---|---|---|---|
| Compound | Start | | | ID |
| ID | Site | Mismatches | Chemistry | NO |
| 793406 | 9979 | 1 | kkk-d10-kkk | 13 |
| 904763 | 8065 | 0 | kkk-d10-kkk | 1095 |
| 905469 | 9836 | 2 | kkk-d10-kkk | 1730 |
| 905505 | 9999 | 3 | kkk-d10-kkk | 76 |
| 905634 | 10424 | 2 | kkk-d10-kkk | 1326 |
| 905665 | 10821 | 3 | kkk-d10-kkk | 81 |
| 972190 | 8066 | 0 | kkk-d9-kkke | 1164 |
| 972163 | 15761, | 2 | kkk-d9-kkke | 1925 |
| | 16086 | | | |

### Treatment

[0398] Prior to the study, the monkeys were kept in quarantine during which the animals were observed daily for general health. The monkeys were 2-4 years old and weighed 2-4 kg each. Eight groups of 4 randomly assigned male cynomolgus monkeys each were administered 30 mg/kg of modified oligonucleotide or PBS. once a week for 12 weeks. One group of monkeys received a dose of saline once a week for 12 weeks. The saline-injected group served as the control group to which oligonucleotide-treated groups were compared. Approximately 48 hours after the last dose, monkeys were sacrificed and tissues were collected for analysis.

[0399] Assessment of tolerability was based on clinical observations, body weights, food consumption, and clinical pathology. Complete necropsies were performed with a recording of any macroscopic abnormality. Terminal necropsy was performed on Day 85. Organ weights were taken. In addition, blood, CSF, and tissues (at necropsy) were collected for toxicokinetic evaluations. The protocols described in the Example were approved by the Institutional Animal Care and Use Committee (IACUC).

### Target Reduction

### RNA Analysis

[0400] RNA was extracted from liver for real-time PCR analysis of mRNA expression of cynoAPOL1. RTS35787 (Forward sequence: CTCCTGCTGAGTGACCATAAAG (SEQ ID NO: 1945); Reverse sequence: GGACTTCTTCGAGCCAGTTT (SEQ ID NO: 1946); Probe sequence: AGAGTGGTGGCTACTGCTGAACTG (SEQ ID NO: 1947)) was used to detect cynomolgus APOL1. Results are presented as percent change of mRNA, relative to saline control, normalized with monkey Cyclophylin A. As shown in the table below, treatment with modified oligonucleotides resulted in reduction of the cynomolgus APOL1 mRNA in comparison to the PBS control for some oligonucleotides.

TABLE 98
Inhibition of Cynomolgus APOL1
compared to the PBS control

| | mismatch | |
|---|---|---|
| | to | |
| Compound | cynomolgus | % |
| ID | sequence | Inhibition |
| 793406 | 1 | 40 |
| 904763 | 0 | 74 |
| 905469 | 2 | 0 |
| 905505 | 3 | 0 |
| 905634 | 2 | 91 |
| 905665 | 3 | 0 |
| 972163 | 2 | 0 |
| 972190 | 0 | 93 |

### Tolerability Studies

### Body and Organ Weight Measurements

[0401] To evaluate the effect of ISIS oligonucleotides on the overall health of the animals, body and organ weights were measured. Body weights were measured on day 84 and are presented in the Table below. Organ weights were measured after euthanasia and the data is also presented in the Table below. The results indicate that effect of treatment with antisense oligonucleotides on body and organ weights was within the expected range for antisense oligonucleotides. Specifically, treatment with ISIS 972190 was well tolerated in terms of the body and organ weights of the monkeys.

TABLE 99
Body and organ weights in Cynomolgus Monkeys after
12 weeks of treatment with modified oligonucleotide

| | Body | | | | | Liver with |
|---|---|---|---|---|---|---|
| | Weight | Heart | Kidney | Spleen | Thymus | gall bladder |
| | (g) | (g) | (g) | (g) | (g) | (g) |
| PBS | 2473 | 9.7 | 12.6 | 2.3 | 3.5 | 50 |
| 793406 | 2419 | 9.1 | 11.9 | 3.5 | 3.0 | 53 |
| 904763 | 2511 | 9.5 | 14.3 | 2.9 | 4.0 | 56 |
| 905469 | 2395 | 9.3 | 16.0 | 3.5 | 2.5 | 59 |
| 905505 | 2550 | 9.4 | 12.9 | 4.7 | 4.5 | 65 |
| 905634 | 2488 | 9.8 | 14.7 | 3.6 | 3.2 | 61 |
| 905665 | 2462 | 9.8 | 14.2 | 3.9 | 4.1 | 56 |
| 972163 | 2606 | 10.8 | 14.8 | 3.3 | 4.2 | 68 |
| 972190 | 2666 | 11.0 | 14.6 | 3.0 | 3.6 | 64 |

### Liver Function

[0402] To evaluate the effect of ISIS oligonucleotides on hepatic function, blood samples were collected from all the study groups. The blood samples were collected via femoral venipuncture, 48 hrs post-dosing. The monkeys were fasted overnight prior to blood collection. Blood was collected in tubes containing K₂-EDTA anticoagulant, which were centrifuged to obtain plasma. Levels of various liver function markers were measured using a Toshiba 200FR NEO chemistry analyzer (Toshiba Co., Japan). Plasma levels of ALT and AST were measured and the results are presented in the Table below, expressed in IU/L. Bilirubin, a liver function marker, was similarly measured and is presented in the Table below, expressed in mg/dL. The results indicate that antisense oligonucleotides had no effect on liver function outside the expected range for antisense oligonucleotides. Specifically, treatment with ISIS 972190 was well tolerated in terms of the liver function in monkeys.

TABLE 100
Liver function markers in cynomolgus monkey plasma

| | ALT | AST | Bilirubin | Albumin |
|---|---|---|---|---|
| | (IU/L) | (IU/L) | (mg/dL) | (g/dL) |
| PBS | 37 | 57 | 0.3 | 4.3 |
| 793406 | 59 | 55 | 0.3 | 4.3 |
| 904763 | 50 | 48 | 0.3 | 4.4 |
| 905469 | 54 | 68 | 0.2 | 3.9 |
| 905505 | 46 | 54 | 0.2 | 4.1 |
| 905634 | 566 | 417 | 0.5 | 4.1 |
| 905665 | 57 | 80 | 0.3 | 4.3 |
| 972163 | 58 | 81 | 0.2 | 4.1 |
| 972190 | 47 | 46 | 0.2 | 4.2 |

### Kidney Function

[0403] To evaluate the effect of ISIS oligonucleotides on kidney function, blood samples were collected from all the study groups. The blood samples were collected via femoral venipuncture, 48 hrs post-dosing. The monkeys were fasted overnight prior to blood collection. Blood was collected in tubes containing K₂-EDTA anticoagulant, which were centrifuged to obtain plasma. Levels of BUN and creatinine were measured using a Toshiba 200FR NEO chemistry analyzer (Toshiba Co., Japan). Results are presented in the Table below, expressed in mg/dL.

[0404] A urinalysis was also conducted prior to sacrifice using a COBAS U 411 analyzer, Combur 10 Test M urine sticks (Roche, Germany), and a Toshiba 120 FR automated chemistry analyzer (Toshiba Co., Japan). Urine was tested for potassium (U-K), microprotein (UTP), creatinine (UCRE), albumin (UALB), chlorine (Ca), sodium (Na), and the protein/creatinine ratio was calculated (P/C). The results are presented in the tables below.

[0405] The plasma and urine chemistry data indicate that most of the ISIS oligonucleotides did not have any effect on the kidney function outside the expected range for antisense oligonucleotides. Specifically, treatment with ISIS 972190 was well tolerated in terms of the kidney function of the monkeys.

TABLE 101
Plasma BUN and creatinine levels
(mg/dL) in cynomolgus monkeys

| | BUN | Creatinine |
|---|---|---|
| Saline | 25 | 0.7 |
| 793406 | 24 | 1.0 |
| 904763 | 25 | 0.7 |
| 905469 | 28 | 0.8 |
| 905505 | 27 | 0.9 |
| 905634 | 27 | 1.0 |
| 905665 | 24 | 0.8 |
| 972163 | 30 | 0.8 |
| 972190 | 20 | 0.8 |

TABLE 102
Urine levels in
cynomolgus monkeys

| | P/C | Creatinine | Albumin |
|---|---|---|---|
| | (ratio) | (mg/dL) | (mg/dL) |
| Saline | 0.08 | 84 | 0.3 |
| 793406 | 0.14 | 71 | 1.7 |
| 904763 | 0.04 | 44 | 0.03 |
| 905469 | 0.10 | 52 | 0.2 |
| 905505 | 0.02 | 77 | 0.1 |
| 905634 | 0.06 | 106 | 0.5 |
| 905665 | 0.04 | 124 | 0.4 |
| 972163 | 0.01 | 69 | 0.2 |
| 972190 | 0.03 | 34 | 0.01 |

### Hematology

[0406] To evaluate any effect of ISIS oligonucleotides in cynomolgus monkeys on hematologic parameters, blood samples of approximately 1.3 mL of blood was collected from each of the available study animals in tubes containing K₂-EDTA. Samples were analyzed for red blood cell (RBC) count, white blood cells (WBC) count, individual white blood cell counts, such as that of monocytes, neutrophils, lymphocytes, as well as for platelet count, hemoglobin content and hematocrit, using an ADVIA120 hematology analyzer (Bayer, USA). The data is presented in the Tables below.

[0407] The data indicate the oligonucleotides did not cause any changes in hematologic parameters outside the expected range for antisense oligonucleotides at this dose. Specifically, treatment with ISIS 972190 was well tolerated in terms of the hematologic parameters of the monkeys.

TABLE 103
Blood cell counts in cynomolgus monkeys

| | | Plate- | | Neutro- | Lympho- | Mono- |
|---|---|---|---|---|---|---|
| | RBC | lets | WBC | phils | cytes | cytes |
| | (×10⁶/ | (×10³/ | (×10³/ | (×10³/ | (×10³/ | (×10³/ |
| | μL) | μL) | μL) | μL) | μL) | μL) |
| Saline | 5.9 | 380 | 8.7 | 2.5 | 5.8 | 0.2 |
| 793406 | 6.8 | 437 | 11.1 | 4.4 | 6.2 | 0.3 |
| 904763 | 6.1 | 412 | 10.6 | 5.2 | 5.0 | 0.2 |
| 905469 | 5.6 | 483 | 9.8 | 6.1 | 3.4 | 0.2 |
| 905505 | 5.8 | 400 | 13.2 | 5.5 | 7.0 | 0.4 |
| 905634 | 6.3 | 340 | 9.9 | 4.0 | 5.2 | 0.3 |
| 905665 | 6.0 | 440 | 8.3 | 2.8 | 5.0 | 0.2 |
| 972163 | 5.9 | 377 | 11.5 | 5.4 | 5.5 | 0.3 |
| 972190 | 6.0 | 392 | 10.5 | 4.5 | 5.6 | 0.3 |

TABLE 104
Hematologic parameters in
cynomolgus monkeys

| | Hemoglobin | HCT |
|---|---|---|
| | (g/dL) | (%) |
| Saline | 14 | 44 |
| 793406 | 15 | 47 |
| 904763 | 14 | 45 |
| 905469 | 12 | 41 |
| 905505 | 13 | 42 |
| 905634 | 14 | 46 |
| 905665 | 13 | 43 |
| 972163 | 13 | 44 |
| 972190 | 13 | 43 |

### C-Reactive Protein and C₃ Activation

[0408] To evaluate any inflammatory effect of ISIS oligonucleotides in cynomolgus monkeys, blood samples were taken for analysis. The monkeys were fasted overnight prior to blood collection. Approximately 1.5 mL of blood was collected from each animal and put into tubes without anticoagulant for serum separation. The tubes were kept at room temperature for a minimum of 90 min and then centrifuged at 3,000 rpm for 10 min at room temperature to obtain serum. C₃ levels were measured to evaluate any complement activation due to oligonucleotide treatment. C-reactive protein (CRP), which is synthesized in the liver and which serves as a marker of inflammation, was measured using a Toshiba 200FR NEO chemistry analyzer (Toshiba Co., Japan). The results indicate that treatment with ISIS 972190 did not cause any inflammation in monkeys.

TABLE 105
C-reactive protein
levels (mg/L)
in cynomolgus
monkey plasma

| | CRP |
|---|---|
| Saline | 1.7 |
| 793406 | 1.4 |
| 904763 | 2.4 |
| 905469 | 8.4 |
| 905505 | 4.1 |
| 905634 | 6.7 |
| 905665 | 10.7 |
| 972163 | 4.7 |
| 972190 | 9.5 |

### Oligonucleotide Concentration Analysis

[0409] Quantification analysis of the concentration of each antisense oligonucleotide in different organs was performed. Most of the oligonucleotides had an acceptable pharmacokinetic profile in the liver and kidney.

TABLE 106
Antisense oligonucleotide
concentration (μg/g tissue)

| ISIS No | Liver | Kidney |
|---|---|---|
| 793406 | 349 | 1253 |
| 904763 | 296 | 982 |
| 905469 | 288 | 2636 |
| 905505 | 547 | 1712 |
| 905634 | 516 | 2307 |
| 905665 | 392 | 942 |
| 972163 | 553 | 2054 |
| 972190 | 978 | 2654 |

[0410] Overall, the results of the study indicate that ISIS 972190 is the most potent and well tolerated compound of those tested for inhibiting APOL1 and is an important candidate for the treatment of APOL1-associated diseases.

The application's sequence listing, which the Patent Office published only in electronic form, follows.

SEQUENCE LISTING (1949 sequences)

SEQ ID NO: 1 - DNA, 2885 bp, Homo sapiens
  source 1..2885: mol_type = other DNA
gactttcactttccctttcgaattcctcggtatatcttggggactggaggacctgtctggttattatacagacgcataactggaggtgggatccacacagctcagaacagctggatcttgctcagtctctgccaggggaagattccttggaggaggccctgcagcgacatggagggagctgctttgctgagagtctctgtcctctgcatctggatgagtgcacttttccttggtgtgggagtgagggcagaggaagctggagcgagggtgcaacaaaacgttccaagtgggacagatactggagatcctcaaagtaagcccctcggtgactgggctgctggcaccatggacccagagagcagtatctttattgaggatgccattaagtatttcaaggaaaaagtgagcacacagaatctgctactcctgctgactgataatgaggcctggaacggattcgtggctgctgctgaactgcccaggaatgaggcagatgagctccgtaaagctctggacaaccttgcaagacaaatgatcatgaaagacaaaaactggcacgataaaggccagcagtacagaaactggtttctgaaagagtttcctcggttgaaaagtgagcttgaggataacataagaaggctccgtgcccttgcagatggggttcagaaggtccacaaaggcaccaccatcgccaatgtggtgtctggctctctcagcatttcctctggcatcctgaccctcgtcggcatgggtctggcacccttcacagagggaggcagccttgtactcttggaacctgggatggagttgggaatcacagccgctttgaccgggattaccagcagtaccatggactacggaaagaagtggtggacacaagcccaagcccacgacctggtcatcaaaagccttgacaaattgaaggaggtgagggagtttttgggtgagaacatatccaactttctttccttagctggcaatacttaccaactcacacgaggcattgggaaggacatccgtgccctcagacgagccagagccaatcttcagtcagtaccgcatgcctcagcctcacgcccccgggtcactgagccaatctcagctgaaagcggtgaacaggtggagagggttaatgaacccagcatcctggaaatgagcagaggagtcaagctcacggatgtggcccctgtaagcttctttcttgtgctggatgtagtctacctcgtgtacgaatcaaagcacttacatgagggggcaaagtcagagacagctgaggagctgaagaaggtggctcaggagctggaggagaagctaaacattctcaacaataattataagattctgcaggcggaccaagaactgtgaccacagggcagggcagccaccaggagagatatgcctggcaggggccaggacaaaatgcaaacttttttttttttctgagacagagtcttgctctgtcgccaagttggagtgcaatggtgcgatctcagctcactgcaagctctgcctcccgtgttcaagcgattctcctgccttggcctcccaagtagctgggactacaggcgcctaccaccatgcccagctaatttttgtatttttaatagagatggggtttcaccatgttggccaggatggtctcgatctcctgacctcttgatctgcccaccttggcctcccaaagtgctgggattacaggcgtgagccatcgcttttgacccaaatgcaaacattttattagggggataaagagggtgaggtaaagtttatggaactgagtgttagggactttggcatttccatagctgagcacagcaggggaggggttaatgcagatggcagtgcagcaaggagaaggcaggaacattggagcctgcaataagggaaaaatgggaactggagagtgtggggaatgggaagaagcagtttactttagactaaagaatatattggggggccgggtgtagtggctcatgcctgtaatccgagcactttgggaggccaaggcgggcggatcacgaggtcaggagatcgagaccatcctggctaacacagtgaaaccccgtctctactaaaaatacaaaaaattagccgggcatggtggcgggcgcctgtagttccagctaactgggcggctgaggcaggagaatggcgtgaacctgggaggtggagcttgcagtgagccgagatatcgccactgcactccagcctgggtgacagagcgagactccatctcaaaaaaaaaaaaaaaaagaatatattgacggaagaatagagaggaggcttgaaggaaccagcaatgagaaggccaggaaaagaaagagctgaaaatggagaaagcccaagagttagaacagttggatacaggagaagaaacagcggctccactacagacccagccccaggttcaatgtcctccgaagaatgaagtctttccctggtgatggtcccctgccctgtctttccagcatccactctcccttgtcctcctgggggcatatctcagtcaggcagcggcttcctgatgatggtcattggggtggttgtcatgtgatgggtcccctccaggttactaaagggtgcatgtcccctgcttgaacactgaagggcaggtggtgggccatggccatggtccccagctgaggagcaggtgtccctgagaacccaaacttcccagagagtatgtgagaaccaaccaatgaaaacagtcccatcgctcttacccggtaagtaaacagtcagaaaattagcatgaaagcagtttagcattgggaggaagctcagatctctagagctgtcttgtcgccgcccaggattgacctgtgtgtaagtcccaataaactcacctactcatcaagctggaaaaaaaaaaaaaaaaaaaaaaa

SEQ ID NO: 2 - DNA, 15454 bp, Homo sapiens
  source 1..15454: mol_type = other DNA
agaaccagctactcaggaggctgaggtggggggatggcttaagcccaggggtttgaagctgctgtgcgcgatgactgtggcactgcaattcagtcttggtgacagactgagaccctgtctcaaaaacataaccaaaataaccccaacggcattacaataaatatacaataagcatccacaaggcatgtgtgggagactgtgcttatgccgatggcacgggcaggagtaaggcaggcatcaggggaatgtggatgcacgggaggatggggagtaatctgcagggtcccatagtatgtcagtggcaggtctttctccttgagaccacagcagacccccagccctgaggatgcgaggcaggtgggttggatgagagggatctggatgtctggtctcaggctgctcctctaagggcagcagcaaggagggtggggctggactgaaggtggaggggagcgtgtttgctgtgcttggtcatgagctgctgggaagttgtgactttcactttccctttcgaattcctcggtatatcttggggactggaggacctgtctggttattatacagacgcataactggaggtgggatccacacagctcagaacagctggatcttgctcagtctctgccaggggaagattccttggtaagttggggacagttgacctgcctccatcttattctcacagcttttgtagataagctgggagaggttaggtgactggttcagatagacaggaaagtagcggcaaagcctggatttgcacccaggcttgagtctgattgcttcccctctcctgctgggctcttaaactatagagggttggggaaacagctcagatgggttcacaaagctccctgggctcagccctggttttgactgctgagacacgactgagtgaacccagaaggaaggtttgtgttgggggtgcccatctctttgggaaatttgaaggaaccaaagaaggtggaggagaggaggtgacccagatcccagcctgttcttatggccaggccacaccaaggctggccccagggtgctgctgctgaggcccaatgggggcaacagaattttttttcaggtacaaggagttcagaggtcatctcacccaccctgagtctgagcaccaacttgtgccaggccctgtggggaaactgaggccctgggagcggaatgacttgcccagggtcccgtgtcaggaggctgagcaggtagatcataggactccacgtctctggccctcacctctgtccctctgttcagacttctggggtgatggagaagaaacaggctgtgctgtgtccctaatgggaaacgtggctgagacaggggagtgagaagggtgcgttgcagaatggtgcctgtggcatgatgccagctttgcaatcatgagattcaaaagccacactgtggaattgtgagtataactacaggagtgagagcttagatctctgtgttcatagaaggagaatcaaacctggaaacttttggattattaaaatcaaacatttttgcttcaatattagagtcacaagggcagatgttggcctcccctctgccctccaagagctgtgtgactctgggaaattcacctcccctcccagcctgagtattttcccctgtaaaaaacctgatagagctgccaaaagtccatgaaatcaggggggtaatttctgtgaaatctgagtcatggtcttatttgttcttcaccaaaaagagatgatgaagcctgtaaccccagtgctgtgggaggcagaggcgggaggatgacttgaggccaggagttcaagacagcctgggaaacacaggagatgctgtctctatgaaatcaaaaattaacaaattagcccagcatggtagtgtgtacctgtagtcccagctactcagaaggttgaaggaggcggatcacttgagcccaacagatctaggctgcaatgagctaggatggtgtcaaagccctgcagcctgggtgacagagcaaaactgtttattaaaaactaaacgaaaggccgggcgcggtggctcacgcctgtaatcccagcactttgggaggccaagacaggtggtcacgaggtcaggatatcgagaccatcctggctaacatggtgaaaccctgtctctactaaaaatacaaaaaaattagccgggtgtcgtggcgggcacctgtagtcccagctactcgggaggctgaggcaggagaatggcgtgaacccgggaggcagagcttgtagcgagcctagatcgccccactgcactccagcctgggtgatagagcgagactccatttcaaaaaaaaaatgaaatgaaaatggtgatttctcaggaggagcacactgtctcaacccctcttttcctgctcaaggaggaggccctgcagcgacatggagggagctgctttgctgagagtctctgtcctctgcatctggtgagcttggctcagagccctgaggcgggagggagggctccctgtctgggctgcacaattggactgggcttgggctgggccagggccatctgggcttcttctaggaaccaaagtcacttcccggaattgaccaaccggcagactcgcccagggaggacccgctgtatcctagttgaggctaacggtcaatatccggcctcaatattcagcagaggctccaggtcagggtctgagccaggccaacaatgaccaaggaggatgggatccagggtgcagctcctcacaagtgtcgggggaatccgaggcaccagctctctctaccctcctgctcctctgctctctcctggtcctcctgtgtcctcatggctcatgagatggtgttgagatggctcccctggcctaggggatcacacagtgaacaaagcaggaagaaggcgaagggatgcccctctcctgtcacccttgtcccttacagcaagaagggcccagacgcccctctgcatactcccctggtgaactgctgcccaggactgggtcccccttttacccttgctgcatggagtccccagaagacaaacatctgtgtgtctgaaccctgagacaaaggcaggaaagggaaagagggaggcgagtggcttttgaggagggggctttagtatgagagctggaggatggaaccccatcagggggcccgggaaccactgagctgttaaaataaagtctgcaaacaaagaccagctgctggaagtgggtgtgccagggagtgcgcagagacacacggtgagaaaagaacaatggtaatgcttggagccgcccctaactgggatgggcctgaaatggtattgttattatttatagtatcattattagtcattttcatcttatttgtaccctccctctatctctcctctccaccttttcctaacattctatcaccagttttatgtcttccattagcaactttgtagctgtaaataatttacttacaactttcatataccctcagttgtacccagtatttcttaacttccctctttaaaaaaatgataatattaatcctccttctccttcgttcagtgcttcacatcccaactgctacctttgtgctttaaattttgtactaattggtgttgataacaagtatatttagttctcatatttatatgttgtgtatatgttttggtttttttttgtcttaaacaagagactactgagagccagtaagactgaaagaaagggcatcttcatatactgctagtttgagtgtgaattggtacaatttgcctgcagtgtggctctaggtataaagccttttgagttgttgatagcctctgacctgctcattctactcctacaaatatcttaaggaaataatctcaaatgtgggcaaagttttatgcgaagaaggatgttctttgtagcataatttatatgaggaattagaaacaccctgaggtccatcagctagggaaagacagcagaggggacagggcagcaccaggagggcttggcagccacagcaggggctgggctggcatctggcaagatccaggtctttgtgggacaaagaatcttagagaagcaacggggacacaggctgtccagtgcagcaccagtgaattcaccaagatgaagagttgagcacagagtgtgagacaaggatttgcaatgaggagtcatttaccatgagcgtgtatacatgactcaatattgtatatttaagggagtagagcacagtcattgaaaacatggggttgaagcagaagtcctggctctagcactattgtaaaaacactggcaagttccctaacttttgtggattcctctgtgtttgaatgggaaagtggtacccatctcctggcctgtgtgtgatcatcgaatgagacacatgtaagaggctctgcacatcgcagacatgcaatacacactggctatcaccagctagttatcacacatgctcccaggccctggtcattgtcagaaccttcctccccatctctatttctgtgtatagactctgtagtttctgtaatgatcagatggctgcccgtcctctgattatcttctcctcataccccaacaggatgagtgcacttttccttggtgtgggagtgagggcagaggaagctggagcgaggtgagtgtctgcaaatagcagatgatgggggctcagtgatagacaaacaatctggtttaggttggtcttggtgtttgcttccaccccagagagatttgcagagccccggctgctcaagcaagcctccctctgtccactggtggctcacatttgatcccacaatttgttttctcctcctcaagggtgcaacaaaacgttccaagtgggacagatactggagatcctcaaagtaagcccctcggtgactgggctgctggcaccatggacccaggtaggctcacctcctcttccctgctggttcctactcgcacttagaatggagggtggcacctccacagctgagtgagccccagaagaacccggatggactaggaggccaatgagtctgcccaaagcagcagaagaggtcacgtggagtcccccgacccaggggtctgggggtcatctgcatcctgacctctccttagggtgacacggcccaggtgcccacttcctccctaccctggcacctagcaaatgactcaagtggggcaggacatccttggggaagtggaatcagcgggggggggggggagtgtggggagagcagggtccaggaggagaggagggctgggagaggaggttgaccagcagccccgacctgtcacctcccgctctgctccaagctgaccctggggtgtttccacctgaggctggtcccctccctccagctcttgccctgccctagcccctttgctctgagtggccctgtgggaatgtatcgggcctgattcagcttccagcttaactggaccccggtctgtcctttgccacatcccctctgtgtgacctggcgctccttacctcccttctcctgtaccatgagaataatatttccccatgttgtcttgaggatcaaatataacacggctacctggcctggccagtgcctgccacacaatagggcctccctaagggctggttcccatcccctctactggtcccctgttgattccaggtggaagccaccccgtccccccccagctgtgttagggcacccgccctgccctgcccatcacaagcacctgcttaccagggatgactgcctcaggcaggggctgagttcagtcatctaaaatacccccggtcaaagaaaaatctgaggcccaatagaattttaaagagttaattgagtaagaaaggattgctgaattgggaaacagcaaactggaggaggcttcgtgctatggtgaaaaagtgtcggagacaaggtttatcgggtgaatatgaaactgcagtaaggacattatttgattggttgcacttacaaaactgcctgtttgggtttaccttgttggaaaatccctggtcacgttggtgccagtgtgagtttagggaggtctccgaatacaggtgagaccggaacttagccttgcccaggtttttgatgctgaagagagaaaaaagtcaaagcaaaagcaaatcagcttttagtgcaaaacagaagtgcaggctcaggggtgggagtgcaggcggactcagaagagccagtcgggcccagtggagtttggggttcttgtctttgctggtttattaaattaaggtgtggagtaagcataaggatttctgggaagaggtggggatttcttggaattgggagggcaatgcagttttgtaccaaacatgggcatacatggaacggctgtggtgcgggtgggtgtggggtttagtgagacaaggagggtatgattgagtgtgaggcaaaacgtgggtcagacccagcgccgagttggatctcactggtcttagctgaattggccacttcctgtttgtcaggatcctgtgggcccatcccctccccctgtccctacaggtggtttcagcaactccttctgtgtctgtcatgtgaacctgctgcctggagttcttgtttcttctgtgacctcccagtatccacatctcagcatggccctctgtcagctggctttaagttttgtttgtatctaacagaagtacccatctgatatgaccccagttgagtttcccatagcttgcagtttcagggggttacagctgttctaaaggcctcgtaggtattgcctgtccaggaatgtttcagggctggtttttgttttaattttgcttttatatccaccagccccaccacatcaagaaatacacagatttagtgccagaggttccttccatccaaacctgggtttccttcctccttttggtgaagaaggaaaaagaaaaaacaagacaatcgctcgcccagccaagtcagcattgcgttcatttccctaagccccatttcctcaggagggcttcctccccttacagagttgccacggcaaccaagtcagctctgctcaggagccgccctggacagcaaactgggctgtgctgagtcctgtccaagacgaggggagggcagggaagattagaagccgagagcactcagccgaccccggaatccttacgaagggctgggctgggggactgaggaaaaactctccccccaaaacaagatgatctgtggtttaataacaggcccagctgggtccagaggtgacagtggagagccgtgtaccctgagaccagcctgcagaggacagaggcaacatggaggtgcctcaaggatcagtgctgagggtcccgcccccatgccccgtcgaagaaccccctccactgcccatctgagagtgcccaagaccagcaggaggaatctcctttgcatggtagttgtactcaatgctgtggagtttgagacattatttttaaactttaaatagccccacaggtaagctataagggagaatgcagagaccacaggcattttcaaaacataaggagttttaatgttaaggagtttaaggagaatgtcaaagaaacattggccttggagtcaaatcctgagcttcctgcttgatggttttgggcggtgactctcgctgtctggattttactttcttcatctgtgaattaagaatgaggtggccgggcactgtggctcacgcctgtaatcccaacatttgggaggccgaggcgggcagatcacaaggtcaggagatcgagacgatcctgtctaacacgatgaaaccctgtctctactaaaaatacaaaaaaaattaccaggcctggtggcaggcgcctgtagtcccagctactcaggaggctgaggcaggagaatggcatgaacccaggaggcagagcttgcagtgagccaagatcgcaccactgcactccagcctgggtgagagagcaagactccatccccccaaaaaaaagaatgaggtctcttgtgtgtgcacggcaagaaacaattttacatcatgcctcagtgcacacacaaatacatactggtccccagttccttatctgcaattccataattcccagatccctgcaaaccacacgttttggtggcagctgacttcaggagtaatcctgctctgtactgacttgagttctttgtagacctaccattattttttacatttaatgtgaatatttgcttgtttcactgttgaaacatgtgtgggtgtgattacagggagcagtccagcctctgctgggaatggtcaggaatataccatatgcaccccgtgtcctttctaaaatagtggaaattctgaatgcctaaacacatctggattccaggaatttacattaagggatatatatttgaaataacccacaaaaacaatactcacccctgctacgcttggtacactctgatattttcaaattgattttctttttaaaatgctgcttttgaaccaataatttcataacccaatgatgtgttgatattcacattttgaagacactggtataaagtgtttgacccaacaggcatgtggcagatggaagtgatcactgggatgtttccacttccttggcctggaaggctcacttcatgttggtgctgagctgaaaaggattcattcctctccaaagcaccatggcactcccctggtgtttcaatgttctcaggctgccatagtaaaatatcacaggctgggtgacttcaacatctggcttttattttctcacagatccagaggcaagaagtccaaggtgaaggtgccaaaagggttggagtctggggaggactctcttgctggcttatggaagctgcctttgcactgtgtgctcacacagtcttcttgtgtccctttctgttcttacaataggacactagccctctaatagaattagagccctacccttgtgatctcattcagtcttaattgcttccttaaaggccagatctccaaatgtagtcacctgagtttaaagcttcagcatatgaattttgggggcacacaattccctctatagcactaatgactccataaaacaagtcccacatcacagctgtccaggaaaattaacatgtagtcatctcttatgcaatggctgttatgcactcccacactttcctccaaccttatcctttcttctttccaactagagagcagtatctttattgaggatgccattaagtatttcaaggaaaaagtgagcacacagaatctgctactcctgctgactgataatgaggcctggaacggattcgtggctgctgctgaactgcccaggtaagctccatggggttacctccattgggcactccggcgatgccacccagctctcccctgggctagttttccctgacaggcacacctcctccaggcagccccctctgctgggcttgaggatgaccttcttggcactccaggaagaatatttcctccatgtccttcgctggcagtgagtagcctcaggctgaggggataggaagcccacaggaacagggtcatttctgccatctgctggtgatgggaactttgccagttactttctcactttcagcctttcttcatcaatggagttttattgtgagaaaaatgagatcgtgcatgtaaagtgcttagcataatgactgacacacagtaggtgcacagttaacgttaacatcttacaagcttggtggaaacagaaccagggttaaggatcttcttcttgaagatgggagcccagcaggacttgacctttgggacaagtcagaaaaatcctgacctaaccaatgtgtgttcctggggatgctggctggagccctttttctcatctgaggaattccataaacacggcaggacccttctgctggtccaggatgccgagaggctggagtggagttgcacagcgctgggtctctttccagctctgtctgtgtccagtccctgggctctgggcttatgtcagagactggaaactgtcatcagtctaataggaatagcaactcaatgtgataggagtgtggtgaaggccttagaggcaactccaggtcaaaggtggggaaccaacaccaagatcctgcccaaaggcccagagagaccgggatcagcgtcagagcctggagtcaggatggagcaagagtcagccttggttgtaggacaagcaggaaggctggggcaccagggctgggactagggtgtggaaagagaggcaccaagggcttgaaacttaaggaggtcatgaacttgcagaggacatgtgagtgggagagggatatttcttccctgtctggatgatcccaacactcatgggcatatagggtcatggttgcctgtgtctctcacaccacgccttggaactggcaagttctgggctaccctttgagaccttcttctcttctacacagagaaacccctgacattgacaagcagtatgtcttagtgaccattttcatagtagaattagttgctgccaatttgtgtaatttcagggatactgagcagactcacaacttcccaaccaaggaggaaaacacttcctctaccatcttgtccaaattcaggtcttttcagcattagcaatttatataggtggttctgaaagtgttttgaatcttctagaggttccataaaattgcaaatggccttggtgtgcacacaggtgaagctgtcactactaaggcatcagttaggctggtgacacctgcgagtgagacctggaaggttgggggtgcaggtggtaggtcaggaggcagtaaggtggctggagcgtccatgtggagccagaatgaatagccagatctcccactccagtcagctggggcagtggccagaaccagtagccttcagccaggtgaaagggcatgaggcattggaagggagcagatgccaggcaaagtgaactcctgtctctccggggttttgtttttgtttgaattcaaagtactcagagatagccagactgcaatgtctgagggcacccttacctttgacaccacctgcaaatttaaggggatttctaaatccatcctttgattttgtaattcactggaaggactcacataactcactgaaaactgctatttcacaattgtggttgatcacacggaaagaacacagattaaaatcagcctaagaaagagacacacggggcagagtttgggagggttttaagtgtgaagcttcattgtcctcaggacgctgtgttctcctgtgtgaatgtgggacaaaacacatgcggtgttgccaaccagggaagctcacccagttaaggaaaaattcctgtgaatcacattaaaccagaaatgaagccttttttcaggattgttgttacaggggagggagactgagcccagctccaaatatagtaaagacagagggggagtcacagccaacaccagggtgggggcgggagatggaacaggactgataggagacaccagagtggggggttcctgctaaattggcctaacaggattctcactaaaggcaggtcagacactcacccatcaatggtgggggtgaagagcataatcagatagcaaagcgtaatcagacagcaaggggggaagaccctccctaaactgacttggggagattcttgctgagctgggtggtgcaggtccagcaagcagtgggtggctgtggaaggccaaggtcggcgcctagtggagaagaggctcagaagagcccagctggagttggtcaaggagaaagtccttctttctcaacccatgccttagtgtccagagtatctgctggggctggatcacaagctgccctcatggctgacctggagtctccagcccctccctgaggtctaacccctttagtccccgggtcctctgggatcaggaaagacaccaaatagccccaaaccccatcatccatcagattcctatacggtcccgtggccaaatcaccaggcaaagacagatgttcctaccaggcaggacattccaggggcctggagatcacttcccaggagctgaggacaaagggaaggcctctctttgggtaaagttcatgcttcactttcctgccatcctgggaataaggtctctttgtctcactctcactgctctttgttcatctgcagagttttccctctccaaacactttggcagtcacggtgttgacctgcccttgaatgaggaggcatctttatcaaacacctaccatgaaagagcatctgagatgcctttaagatatttatttccatatggaataaatattgaggagtatctatgatgaacaaaatgtgtttgagtttgaaagataattaattccatttgtaaaatttgtttctatttgatcgatagtgaaagctctgcaatttacacaggatagagatcacatggagctcatttcacagacagggaaactgcatttcttttttttttttttttttttgagttggagtcttgctctgtcgcccaagctggagtgcagtggcgcgatctcggctcactgcaagctctgcctcccggttcaagcaattctcctgcctcagcctcctgagtagctgggactacaggcgcccaccaccacgcccggctaattttttgaatttttggtagagacagggtttcaccgtattagtcaggatggtctcaatctcctgaccttgtgatccacccgccttggcctcccaaagtgctgggattacaggtgtgagccaccacaccgagccaaaactgcatttcttaatcctttaacctttccttgtgcaggaatgaggcagatgagctccgtaaagctctggacaaccttgcaagacaaatgatcatgaaagacaaaaactggcacgataaaggccagcagtacagaaactggtttctgaaagagtttcctcggttgaaaagtgagcttgaggataacataagaaggctccgtgcccttgcagatggggttcagaaggtccacaaaggcaccaccatcgccaatgtggtgtctggctctctcagcatttcctctggcatcctgaccctcgtcggcatgggtctggcacccttcacagagggaggcagccttgtactcttggaacctgggatggagttgggaatcacagccgctttgaccgggattaccagcagtaccatggactacggaaagaagtggtggacacaagcccaagcccacgacctggtcatcaaaagccttgacaaattgaaggaggtgagggagtttttgggtgagaacatatccaactttctttccttagctggcaatacttaccaactcacacgaggcattgggaaggacatccgtgccctcagacgagccagagccaatcttcagtcagtaccgcatgcctcagcctcacgcccccgggtcactgagccaatctcagctgaaagcggtgaacaggtggagagggttaatgaacccagcatcctggaaatgagcagaggagtcaagctcacggatgtggcccctgtaagcttctttcttgtgctggatgtagtctacctcgtgtacgaatcaaagcacttacatgagggggcaaagtcagagacagctgaggagctgaagaaggtggctcaggagctggaggagaagctaaacattctcaacaataattataagattctgcaggcggaccaagaactgtgaccacagggcagggcagccaccaggagagatatgcctggcaggggccaggacaaaatgcaaacttttttttttttctgagacagagtcttgctctgtcgccaagttggagtgcaatggtgcgatctcagctcactgcaagctctgcctcccgtgttcaagcgattctcctgccttggcctcccaagtagctgggactacaggcgcctaccaccatgcccagctaatttttgtatttttaatagagatggggtttcaccatgttggccaggatggtctcgatctcctgacctcttgatctgcccaccttggcctcccaaagtgctgggattacaggcgtgagccatcgcttttgacccaaatgcaaacattttattagggggataaagagggtgaggtaaagtttatggaactgagtgttagggactttggcatttccatagctgagcacagcaggggaggggttaatgcagatggcagtgcagcaaggagaaggcaggaacattggagcctgcaataagggaaaaatgggaactggagagtgtggggaatgggaagaagcagtttactttagactaaagaatatattggggggccgggtgtagtggctcatgcctgtaatccgagcactttgggaggccaaggcgggcggatcacgaggtcaggagatcgagaccatcctggctaacacagtgaaaccccgtctctactaaaaatacaaaaaattagccgggcatggtggcgggcgcctgtagttccagctaactgggcggctgaggcaggagaatggcgtgaacctgggaggtggagcttgcagtgagccgagatatcgccactgcactccagcctgggtgacagagcgagactccatctcaaaaaaaaaaaaaaaaagaatatattgacggaagaatagagaggaggcttgaaggaaccagcaatgagaaggccaggaaaagaaagagctgaaaatggagaaagcccaagagttagaacagttggatacaggagaagaaacagcggctccactacagacccagccccaggttcaatgtcctccgaagaatgaagtctttccctggtgatggtcccctgccctgtctttccagcatccactctcccttgtcctcctgggggcatatctcagtcaggcagcggcttcctgatgatggtcattggggtggttgtcatgtgatgggtcccctccaggttactaaagggtgcatgtcccctgcttgaacactgaagggcaggtggtgggccatggccatggtccccagctgaggagcaggtgtccctgagaacccaaacttcccagagagtatgtgagaaccaaccaatgaaaacagtcccatcgctcttacccggtaagtaaacagtcagaaaattagcatgaaagcagtttagcattgggaggaagctcagatctctagagctgtcttgtcgccgcccaggattgacctgtgtgtaagtcccaataaactcacctactcatcaagctggacttgttcgagtcattctttggtctctcagctctttccaagctttgggggccatcagtctcaagtttttctcgtaatggtggtgatggtggttgtgatggcagcagagtggtgggggccttggcaagtggtcggtgctcttccagaccaggggacaccgatggaccgatgaagttccaggggaacttgaagtgctgtgttggaaagaggttaatttgggaagaaaggaaaaatgaaaggagatgccaggaacaggtcaaggaaccttgaggtgtgtccaggagttcaaccccgcttgtggtcacgagacctcgcctctctgagcctcagtttcctcatcagctgtagaagggtacctggacaaggtgatgtctcaggtccacccagctctccccatcttgtgtcctggagacttgggtccaatcagcactgactgatggctgtgcctttgtggtgccgatggaggctcccctgggctctgggtgcctgacttcccttcctc

SEQ ID NO: 3 - DNA, 2831 bp, Homo sapiens
  source 1..2831: mol_type = other DNA
gactttcactttccctttcgaattcctcggtatatcttggggactggaggacctgtctggttattatacagacgcataactggaggtgggatccacacagctcagaacagctggatcttgctcagtctctgccaggggaagattccttggaggaggccctgcagcgacatggagggagctgctttgctgagagtctctgtcctctgcatctgggtgcaacaaaacgttccaagtgggacagatactggagatcctcaaagtaagcccctcggtgactgggctgctggcaccatggacccagagagcagtatctttattgaggatgccattaagtatttcaaggaaaaagtgagcacacagaatctgctactcctgctgactgataatgaggcctggaacggattcgtggctgctgctgaactgcccaggaatgaggcagatgagctccgtaaagctctggacaaccttgcaagacaaatgatcatgaaagacaaaaactggcacgataaaggccagcagtacagaaactggtttctgaaagagtttcctcggttgaaaagtgagcttgaggataacataagaaggctccgtgcccttgcagatggggttcagaaggtccacaaaggcaccaccatcgccaatgtggtgtctggctctctcagcatttcctctggcatcctgaccctcgtcggcatgggtctggcacccttcacagagggaggcagccttgtactcttggaacctgggatggagttgggaatcacagccgctttgaccgggattaccagcagtaccatggactacggaaagaagtggtggacacaagcccaagcccacgacctggtcatcaaaagccttgacaaattgaaggaggtgagggagtttttgggtgagaacatatccaactttctttccttagctggcaatacttaccaactcacacgaggcattgggaaggacatccgtgccctcagacgagccagagccaatcttcagtcagtaccgcatgcctcagcctcacgcccccgggtcactgagccaatctcagctgaaagcggtgaacaggtggagagggttaatgaacccagcatcctggaaatgagcagaggagtcaagctcacggatgtggcccctgtaagcttctttcttgtgctggatgtagtctacctcgtgtacgaatcaaagcacttacatgagggggcaaagtcagagacagctgaggagctgaagaaggtggctcaggagctggaggagaagctaaacattctcaacaataattataagattctgcaggcggaccaagaactgtgaccacagggcagggcagccaccaggagagatatgcctggcaggggccaggacaaaatgcaaacttttttttttttctgagacagagtcttgctctgtcgccaagttggagtgcaatggtgcgatctcagctcactgcaagctctgcctcccgtgttcaagcgattctcctgccttggcctcccaagtagctgggactacaggcgcctaccaccatgcccagctaatttttgtatttttaatagagatggggtttcaccatgttggccaggatggtctcgatctcctgacctcttgatctgcccaccttggcctcccaaagtgctgggattacaggcgtgagccatcgcttttgacccaaatgcaaacattttattagggggataaagagggtgaggtaaagtttatggaactgagtgttagggactttggcatttccatagctgagcacagcaggggaggggttaatgcagatggcagtgcagcaaggagaaggcaggaacattggagcctgcaataagggaaaaatgggaactggagagtgtggggaatgggaagaagcagtttactttagactaaagaatatattggggggccgggtgtagtggctcatgcctgtaatccgagcactttgggaggccaaggcgggcggatcacgaggtcaggagatcgagaccatcctggctaacacagtgaaaccccgtctctactaaaaatacaaaaaattagccgggcatggtggcgggcgcctgtagttccagctaactgggcggctgaggcaggagaatggcgtgaacctgggaggtggagcttgcagtgagccgagatatcgccactgcactccagcctgggtgacagagcgagactccatctcaaaaaaaaaaaaaaaaagaatatattgacggaagaatagagaggaggcttgaaggaaccagcaatgagaaggccaggaaaagaaagagctgaaaatggagaaagcccaagagttagaacagttggatacaggagaagaaacagcggctccactacagacccagccccaggttcaatgtcctccgaagaatgaagtctttccctggtgatggtcccctgccctgtctttccagcatccactctcccttgtcctcctgggggcatatctcagtcaggcagcggcttcctgatgatggtcattggggtggttgtcatgtgatgggtcccctccaggttactaaagggtgcatgtcccctgcttgaacactgaagggcaggtggtgggccatggccatggtccccagctgaggagcaggtgtccctgagaacccaaacttcccagagagtatgtgagaaccaaccaatgaaaacagtcccatcgctcttacccggtaagtaaacagtcagaaaattagcatgaaagcagtttagcattgggaggaagctcagatctctagagctgtcttgtcgccgcccaggattgacctgtgtgtaagtcccaataaactcacctactcatcaagctggaaaaaaaaaaaaaaaaaaaaaaa

SEQ ID NO: 4 - DNA, 2924 bp, Homo sapiens
  source 1..2924: mol_type = other DNA
gactttcactttccctttcgaattcctcggtatatcttggggactggaggacctgtctggttattatacagacgcataactggaggtgggatccacacagctcagaacagctggatcttgctcagtctctgccaggggaagattccttggaggagcacactgtctcaacccctcttttcctgctcaaggaggaggccctgcagcgacatggagggagctgctttgctgagagtctctgtcctctgcatctggatgagtgcacttttccttggtgtgggagtgagggcagaggaagctggagcgagggtgcaacaaaacgttccaagtgggacagatactggagatcctcaaagtaagcccctcggtgactgggctgctggcaccatggacccagagagcagtatctttattgaggatgccattaagtatttcaaggaaaaagtgagcacacagaatctgctactcctgctgactgataatgaggcctggaacggattcgtggctgctgctgaactgcccaggaatgaggcagatgagctccgtaaagctctggacaaccttgcaagacaaatgatcatgaaagacaaaaactggcacgataaaggccagcagtacagaaactggtttctgaaagagtttcctcggttgaaaagtgagcttgaggataacataagaaggctccgtgcccttgcagatggggttcagaaggtccacaaaggcaccaccatcgccaatgtggtgtctggctctctcagcatttcctctggcatcctgaccctcgtcggcatgggtctggcacccttcacagagggaggcagccttgtactcttggaacctgggatggagttgggaatcacagccgctttgaccgggattaccagcagtaccatggactacggaaagaagtggtggacacaagcccaagcccacgacctggtcatcaaaagccttgacaaattgaaggaggtgagggagtttttgggtgagaacatatccaactttctttccttagctggcaatacttaccaactcacacgaggcattgggaaggacatccgtgccctcagacgagccagagccaatcttcagtcagtaccgcatgcctcagcctcacgcccccgggtcactgagccaatctcagctgaaagcggtgaacaggtggagagggttaatgaacccagcatcctggaaatgagcagaggagtcaagctcacggatgtggcccctgtaagcttctttcttgtgctggatgtagtctacctcgtgtacgaatcaaagcacttacatgagggggcaaagtcagagacagctgaggagctgaagaaggtggctcaggagctggaggagaagctaaacattctcaacaataattataagattctgcaggcggaccaagaactgtgaccacagggcagggcagccaccaggagagatatgcctggcaggggccaggacaaaatgcaaacttttttttttttctgagacagagtcttgctctgtcgccaagttggagtgcaatggtgcgatctcagctcactgcaagctctgcctcccgtgttcaagcgattctcctgccttggcctcccaagtagctgggactacaggcgcctaccaccatgcccagctaatttttgtatttttaatagagatggggtttcaccatgttggccaggatggtctcgatctcctgacctcttgatctgcccaccttggcctcccaaagtgctgggattacaggcgtgagccatcgcttttgacccaaatgcaaacattttattagggggataaagagggtgaggtaaagtttatggaactgagtgttagggactttggcatttccatagctgagcacagcaggggaggggttaatgcagatggcagtgcagcaaggagaaggcaggaacattggagcctgcaataagggaaaaatgggaactggagagtgtggggaatgggaagaagcagtttactttagactaaagaatatattggggggccgggtgtagtggctcatgcctgtaatccgagcactttgggaggccaaggcgggcggatcacgaggtcaggagatcgagaccatcctggctaacacagtgaaaccccgtctctactaaaaatacaaaaaattagccgggcatggtggcgggcgcctgtagttccagctaactgggcggctgaggcaggagaatggcgtgaacctgggaggtggagcttgcagtgagccgagatatcgccactgcactccagcctgggtgacagagcgagactccatctcaaaaaaaaaaaaaaaaagaatatattgacggaagaatagagaggaggcttgaaggaaccagcaatgagaaggccaggaaaagaaagagctgaaaatggagaaagcccaagagttagaacagttggatacaggagaagaaacagcggctccactacagacccagccccaggttcaatgtcctccgaagaatgaagtctttccctggtgatggtcccctgccctgtctttccagcatccactctcccttgtcctcctgggggcatatctcagtcaggcagcggcttcctgatgatggtcattggggtggttgtcatgtgatgggtcccctccaggttactaaagggtgcatgtcccctgcttgaacactgaagggcaggtggtgggccatggccatggtccccagctgaggagcaggtgtccctgagaacccaaacttcccagagagtatgtgagaaccaaccaatgaaaacagtcccatcgctcttacccggtaagtaaacagtcagaaaattagcatgaaagcagtttagcattgggaggaagctcagatctctagagctgtcttgtcgccgcccaggattgacctgtgtgtaagtcccaataaactcacctactcatcaagctggaaaaaaaaaaaaaaaaaaaaaaa

SEQ ID NO: 5 - DNA, 3039 bp, Homo sapiens
  source 1..3039: mol_type = other DNA
gactttcactttccctttcgaattcctcggtatatcttggggactggaggacctgtctggttattatacagacgcataactggaggtgggatccacacagctcagaacagctggatcttgctcagtctctgccaggggaagattccttgacttctggggtgatggagaagaaacaggctgtgctgtgtccctaatgggaaacgtggctgagacaggggagtgagaagggtgcgttgcagaatggtgcctgtggcatgatgccagctttgcaatcatgagattcaaaagccacactgtggaattgaggaggccctgcagcgacatggagggagctgctttgctgagagtctctgtcctctgcatctggatgagtgcacttttccttggtgtgggagtgagggcagaggaagctggagcgagggtgcaacaaaacgttccaagtgggacagatactggagatcctcaaagtaagcccctcggtgactgggctgctggcaccatggacccagagagcagtatctttattgaggatgccattaagtatttcaaggaaaaagtgagcacacagaatctgctactcctgctgactgataatgaggcctggaacggattcgtggctgctgctgaactgcccaggaatgaggcagatgagctccgtaaagctctggacaaccttgcaagacaaatgatcatgaaagacaaaaactggcacgataaaggccagcagtacagaaactggtttctgaaagagtttcctcggttgaaaagtgagcttgaggataacataagaaggctccgtgcccttgcagatggggttcagaaggtccacaaaggcaccaccatcgccaatgtggtgtctggctctctcagcatttcctctggcatcctgaccctcgtcggcatgggtctggcacccttcacagagggaggcagccttgtactcttggaacctgggatggagttgggaatcacagccgctttgaccgggattaccagcagtaccatggactacggaaagaagtggtggacacaagcccaagcccacgacctggtcatcaaaagccttgacaaattgaaggaggtgagggagtttttgggtgagaacatatccaactttctttccttagctggcaatacttaccaactcacacgaggcattgggaaggacatccgtgccctcagacgagccagagccaatcttcagtcagtaccgcatgcctcagcctcacgcccccgggtcactgagccaatctcagctgaaagcggtgaacaggtggagagggttaatgaacccagcatcctggaaatgagcagaggagtcaagctcacggatgtggcccctgtaagcttctttcttgtgctggatgtagtctacctcgtgtacgaatcaaagcacttacatgagggggcaaagtcagagacagctgaggagctgaagaaggtggctcaggagctggaggagaagctaaacattctcaacaataattataagattctgcaggcggaccaagaactgtgaccacagggcagggcagccaccaggagagatatgcctggcaggggccaggacaaaatgcaaacttttttttttttctgagacagagtcttgctctgtcgccaagttggagtgcaatggtgcgatctcagctcactgcaagctctgcctcccgtgttcaagcgattctcctgccttggcctcccaagtagctgggactacaggcgcctaccaccatgcccagctaatttttgtatttttaatagagatggggtttcaccatgttggccaggatggtctcgatctcctgacctcttgatctgcccaccttggcctcccaaagtgctgggattacaggcgtgagccatcgcttttgacccaaatgcaaacattttattagggggataaagagggtgaggtaaagtttatggaactgagtgttagggactttggcatttccatagctgagcacagcaggggaggggttaatgcagatggcagtgcagcaaggagaaggcaggaacattggagcctgcaataagggaaaaatgggaactggagagtgtggggaatgggaagaagcagtttactttagactaaagaatatattggggggccgggtgtagtggctcatgcctgtaatccgagcactttgggaggccaaggcgggcggatcacgaggtcaggagatcgagaccatcctggctaacacagtgaaaccccgtctctactaaaaatacaaaaaattagccgggcatggtggcgggcgcctgtagttccagctaactgggcggctgaggcaggagaatggcgtgaacctgggaggtggagcttgcagtgagccgagatatcgccactgcactccagcctgggtgacagagcgagactccatctcaaaaaaaaaaaaaaaaagaatatattgacggaagaatagagaggaggcttgaaggaaccagcaatgagaaggccaggaaaagaaagagctgaaaatggagaaagcccaagagttagaacagttggatacaggagaagaaacagcggctccactacagacccagccccaggttcaatgtcctccgaagaatgaagtctttccctggtgatggtcccctgccctgtctttccagcatccactctcccttgtcctcctgggggcatatctcagtcaggcagcggcttcctgatgatggtcattggggtggttgtcatgtgatgggtcccctccaggttactaaagggtgcatgtcccctgcttgaacactgaagggcaggtggtgggccatggccatggtccccagctgaggagcaggtgtccctgagaacccaaacttcccagagagtatgtgagaaccaaccaatgaaaacagtcccatcgctcttacccggtaagtaaacagtcagaaaattagcatgaaagcagtttagcattgggaggaagctcagatctctagagctgtcttgtcgccgcccaggattgacctgtgtgtaagtcccaataaactcacctactcatcaagctggaaaaaaaaaaaaaaaaaaaaaaa

SEQ ID NO: 6 - DNA, 541 bp, Homo sapiens
  source 1..541: mol_type = other DNA
tggactgaaggtggaggggagcgtgtttgctgtgcttggtcatgagctgctgggaagttgtactttcactttccctttcgaattcctcggtatatcttggggactggaggacctgtctggttattatacagacgcataactggaggtgggatccacacagctcagaacagctggatcttgctcagtctctgccaggggaagattccttggaggaggccctgcagcgacatggagggagctgctttgctgagagtctctgtcctctgcatctggatgagtgcacttttccttggtgtgggagtgagggcagaggaagctggagcgagggtgcaacaaaacgttccaagtgggacagatactggagatcctcaaagtaagcccctcggtgactgggctgctggcaccatggacccagagagcagtatctttattgaggatgccattaagtatttcaaggaaaaagtgagcacacagaatctgctactcctgctgactgataatgaggcctggaacggattcgtggctgctgctgaactgccca

SEQ ID NO: 7 - DNA, 1784 bp, Homo sapiens
  source 1..1784: mol_type = other DNA
aaaaattttccctttcgaattcctcggtatatcttggggactggaggacctgtctggttattatacagacgcataactggaggtgggatccacacagctcagaacagctggatcttgctcagtctctgccaggggaagattccttggaggaggccctgcagcgacatggagggagctgctttgctgagagtctctgtcctctgcatctggatgagtgcacttttccttggtgtgggagtgagggcagaggaagctggagcgagggtgcaacaaaacgttccaagtgggacagatactggagatcctcaaagtaagcccctcggtgactgggctgctggcaccatggacccaggcccagctgggtccagaggtgacagtggagagccgtgtaccctgagaccagcctgcagaggacagaggcaacatggaggtgcctcaaggatcagtgctgagggtcccgcccccatgccccgtcgaagaaccccctccactgcccatctgagagtgcccaagaccagcaggaggaatctcctttgcatgagagcagtatctttattgaggatgccattaagtatttcaaggaaaaagtgagcacacagaatctgctactcctgctgactgataatgaggcctggaacggattcgtggctgctgctgaactgcccaggaatgaggcagatgagctccgtaaagctctggacaaccttgcaagacaaatgatcatgaaagacaaaaactggcacgataaaggccagcagtacagaaactggtttctgaaagagtttcctcggttgaaaagtaagcttgaggataacataagaaggctccgtgcccttgcagatggggttcagaaggtccacaaaggcaccaccatcgccaatgtggtgtctggctctctcagcatttcctctggcatcctgaccctcgtcggcatgggtctggcacccttcacagagggaggcagccttgtactcttggaacctgggatggagttgggaatcacagcagctttgaccgggattaccagcagtaccatagactacggaaagaagtggtggacacaagcccaagcccacgacctggtcatcaaaagccttgacaaattgaaggaggtgaaggagtttttgggtgagaacatatccaactttctttccttagctggcaatacttaccaactcacacgaggcattgggaaggacatccgtgccctcagacgagccagagccaatcttcagtcagtaccgcatgcctcagcctcacgcccccgggtcactgagccaatctcagctgaaagcggtgaacaggtggagagagttaatgaacccagcatcctggaaatgagcagaggagtcaagctcacggatgtggcccctgtaagcttctttcttgtgctggatgtagtctacctcgtgtacgaatcaaagcacttacatgagggggcaaagtcagagacagctgaggagctgaagaaggtggctcaggagctggaggagaagctaaacattctcaacaataattataattctgcaggcggaccaagaactgtgaccacagggcagggcagccaccaggagagatatgcctggcaggggccaggacaaaatgcaaacttttttttttttctgagacagagtcttgctctgtcgccaagttggagtgcaatggtgcgatctcggctcactgcaagctctgcctcccgtgttcaagcgattctcctgccttggcctcccaagtagctgggactacaggcgcctaccaccatgcccagctaatttttgtatttt

SEQ ID NO: 8 - DNA, 210 bp, Homo sapiens
  source 1..210: mol_type = other DNA
tggactgaaggtggaggggagcgtgtttgctgtgcttggtcatgagctgctgggaagttgtgactttcactttccctttcgaattcctcggtatatcttggggactggaggacctgtctggttattatacagacgcataactggaggtgggatccacacagctcagaacagctggatcttgctcagtctctgccaggggaagattccttg

SEQ ID NO: 9 - DNA, 21000 bp, Homo sapiens
  source 1..21000: mol_type = other DNA
caaaagaaactagagaatgcctgttattggattctagctttctccattgttttctagccgtattgtttgtccacagtttatctggactacatactgaattctttcctggccacaagtctccaaactaatattttgcttttctttttctctcatttttctgacttggaatcaccagaaatccaaactgtgcttttcttaaagtcctgcaaactgaagcttgaaaactgtgttatagtgaaggaagagaaagaccctctcatattatttttatattgttttgtactcagtacctgttttaagaaaaaacaacaaggaagtaaaaccaaagacaggcagcccggcgccaggcccgaaaccaggcctgggcccgcctggcctaaacccattagttaaaaatcaacttatgattcagaagccgatgttattcatagattccttacattatgtagaagaacattgtgaaactccctgccctgttctgttcccccctgacgacctgtgtatgcagcccctgtcacgtaccgcctgcttgctcaaatcaatcatgaccctttcgtgtgaaatctttagtgttgtgagcccttaaaagggacagaaattgtgcactcagggagctcggattttaaggcagtagcttgccgatgctcccagctgaataaagcccttccttctactactcggtgtctgagaggttttgtctgcagctcgtcctgctacaatagaattcagaccaaactcgtgaccagagactcatttgcttctacagtgttttgtccaaaagatgttgaagaacggccaggcgcagtggctcacgcctgtaatcccagcgctttcggaggccgaggcaggcagatcacaacgccaagagatcgagaccatgctggccaagatggtgaaacgctgtctgtactaaaaatacaaaaattagctgggcttggtggtgcgtgcctgtagtcccagctacttgggaggctgaggcaggagaatcacttgaacccgggaggtggaggttgcagtgagccgagatcacaacactgcactccagcctggcaacagagcaagaatctgtcaaaaaaaaaaaaaaaaaaaaagttgttgaagaacaaggagaaaacgtgaaaggaaaatcaaatcttgggaccccaaaactcactggaaacagttaagcttagaaacggagtcactccaaaacctgcctttgtttttgcttctaagcagatatttgcgaagacaaaaggcaacatgttccccaggtagcctccttcacaaattgctcacaaggaaactccttgtgggtcccagcagtttttaccctgaggcagactttgtgtaatttcattgtgacaatgcaaattagcaacttatctttactggtacatgataaataacaagacttctgcccaccctcagaaaaatgcacatatgcctgcttcctctactctatgttcatttttatcttatataaaatgtagacgaactgtgcatgagacgaatgaataattgactgttcctctaccccctcctttcatagacaacctgtggattcaaggagggctaatcaaagcttcacaagaatgtgaccactcacctcattacctatcctgtcttttttcctttcctccttccactcctgcctgattttacacatttaaatactggaggcctcaaaaccctctgtgaaaaacgagtggaccccagaacctcctgtgacttgtgtgactttttcctgggtgcatcctcaaccttggcagagtaaacatctaaactgactgagacgtgtcccagaccctctttggtttacaagtcttgcctcctccctgagttgctggatgaaagcaacgtcctctcttcttgcctcagtttcctcatctgcaaaatcagatcataatcctggcccattgaggggatgattataaaactcaatcaaatggagaagcatttgcaaatggaatgtattgcaaagtgtattgtgcagtccctgtgtaatcaccattctcttcctgcctcataagctggtgtgtgtgtgtgtatgggtggggtgaggtggacacgatgcccccagagatgtttgctcaggatgaaataggcccccatggaagggtcaggttggcttctgtggtttagctgcctttgaggcccttctgcctggggcaaagcacaaaagtccaatagcaatctggttgcatgacttcctagtcatggaagtgtggctgagcagtggtctctagtccctccaccctgtgtgcctcgggagtggaacacggggcagtggcctctgctggggaggatgctgggggatctctgaaaggaggcaatgcctgattttgtcactgaacgatgagcatgatttttccaggcggtggaagcaggtgctcccggcagaagaccccatataagcaaatatctagaagccacaaggcatggccttcaacaagagcaggcctggtgcggtggctcatgccaaggtgggaggatcacttgaggcctggagttcaagagtagcccagtcaatatagtgaggcaccatctctaatataatttttttaaaaattagctgggtggttggctgatacctgtagaaccagctactcaggaggctgaggtggggggatggcttaagcccaggggtttgaagctgctgtgcgcgatgactgtggcactgcaattcagtcttggtgacagactgagaccctgtctcaaaaacataaccaaaataaccccaacggcattacaataaatatacaataagcatccacaaggcatgtgtgggagactgtgcttatgccgatggcacgggcaggagtaaggcaggcatcaggggaatgtggatgcacgggaggatggggagtaatctgcagggtcccatagtatgtcagtggcaggtctttctccttgagaccacagcagacccccagccctgaggatgcgaggcaggtgggttggatgagagggatctggatgtctggtctcaggctgctcctctaagggcagcagcaaggagggtggggctggactgaaggtggaggggagcgtgtttgctgtgcttggtcatgagctgctgggaagttgtgactttcactttccctttcgaattcctcggtatatcttggggactggaggacctgtctggttattatacagacgcataactggaggtgggatccacacagctcagaacagctggatcttgctcagtctctgccaggggaagattccttggtaagttggggacagttgacctgcctccatcttattctcacagcttttgtagataagctgggagaggttaggtgactggttcagatagacaggaaagtagcggcaaagcctggatttgcacccaggcttgagtctgattgcttcccctctcctgctgggctcttaaactatagagggttggggaaacagctcagatgggttcacaaagctccctgggctcagccctggttttgactgctgagacacgactgagtgaacccagaaggaaggtttgtgttgggggtgcccatctctttgggaaatttgaaggaaccaaagaaggtggaggagaggaggtgacccagatcccagcctgttcttatggccaggccacaccaaggctggccccagggtgctgctgctgaggcccaatgggggcaacagaattttttttcaggtacaaggagttcagaggtcatctcacccaccctgagtctgagcaccaacttgtgccaggccctgtggggaaactgaggccctgggagcggaatgacttgcccagggtcccgtgtcaggaggctgagcaggtagatcataggactccacgtctctggccctcacctctgtccctctgttcagacttctggggtgatggagaagaaacaggctgtgctgtgtccctaatgggaaacgtggctgagacaggggagtgagaagggtgcgttgcagaatggtgcctgtggcatgatgccagctttgcaatcatgagattcaaaagccacactgtggaattgtgagtataactacaggagtgagagcttagatctctgtgttcatagaaggagaatcaaacctggaaacttttggattattaaaatcaaacatttttgcttcaatattagagtcacaagggcagatgttggcctcccctctgccctccaagagctgtgtgactctgggaaattcacctcccctcccagcctgagtattttcccctgtaaaaaacctgatagagctgccaaaagtccatgaaatcaggggggtaatttctgtgaaatctgagtcatggtcttatttgttcttcaccaaaaagagatgatgaagcctgtaaccccagtgctgtgggaggcagaggcgggaggatgacttgaggccaggagttcaagacagcctgggaaacacaggagatgctgtctctatgaaatcaaaaattaacaaattagcccagcatggtagtgtgtacctgtagtcccagctactcagaaggttgaaggaggcggatcacttgagcccaacagatctaggctgcaatgagctaggatggtgtcaaagccctgcagcctgggtgacagagcaaaactgtttattaaaaactaaacgaaaggccgggcgcggtggctcacgcctgtaatcccagcactttgggaggccaagacaggtggtcacgaggtcaggatatcgagaccatcctggctaacatggtgaaaccctgtctctactaaaaatacaaaaaaattagccgggtgtcgtggcgggcacctgtagtcccagctactcgggaggctgaggcaggagaatggcgtgaacccgggaggcagagcttgtagcgagcctagatcgccccactgcactccagcctgggtgatagagcgagactccatttcaaaaaaaaaatgaaatgaaaatggtgatttctcaggaggagcacactgtctcaacccctcttttcctgctcaaggaggaggccctgcagcgacatggagggagctgctttgctgagagtctctgtcctctgcatctggtgagcttggctcagagccctgaggcgggagggagggctccctgtctgggctgcacaattggactgggcttgggctgggccagggccatctgggcttcttctaggaaccaaagtcacttcccggaattgaccaaccggcagactcgcccagggaggacccgctgtatcctagttgaggctaacggtcaatatccggcctcaatattcagcagaggctccaggtcagggtctgagccaggccaacaatgaccaaggaggatgggatccagggtgcagctcctcacaagtgtcgggggaatccgaggcaccagctctctctaccctcctgctcctctgctctctcctggtcctcctgtgtcctcatggctcatgagatggtgttgagatggctcccctggcctaggggatcacacagtgaacaaagcaggaagaaggcgaagggatgcccctctcctgtcacccttgtcccttacagcaagaagggcccagacgcccctctgcatactcccctggtgaactgctgcccaggactgggtcccccttttacccttgctgcatggagtccccagaagacaaacatctgtgtgtctgaaccctgagacaaaggcaggaaagggaaagagggaggcgagtggcttttgaggagggggctttagtatgagagctggaggatggaaccccatcagggggcccgggaaccactgagctgttaaaataaagtctgcaaacaaagaccagctgctggaagtgggtgtgccagggagtgcgcagagacacacggtgagaaaagaacaatggtaatgcttggagccgcccctaactgggatgggcctgaaatggtattgttattatttatagtatcattattagtcattttcatcttatttgtaccctccctctatctctcctctccaccttttcctaacattctatcaccagttttatgtcttccattagcaactttgtagctgtaaataatttacttacaactttcatataccctcagttgtacccagtatttcttaacttccctctttaaaaaaatgataatattaatcctccttctccttcgttcagtgcttcacatcccaactgctacctttgtgctttaaattttgtactaattggtgttgataacaagtatatttagttctcatatttatatgttgtgtatatgttttggtttttttttgtcttaaacaagagactactgagagccagtaagactgaaagaaagggcatcttcatatactgctagtttgagtgtgaattggtacaatttgcctgcagtgtggctctaggtataaagccttttgagttgttgatagcctctgacctgctcattctactcctacaaatatcttaaggaaataatctcaaatgtgggcaaagttttatgcgaagaaggatgttctttgtagcataatttatatgaggaattagaaacaccctgaggtccatcagctagggaaagacagcagaggggacagggcagcaccaggagggcttggcagccacagcaggggctgggctggcatctggcaagatccaggtctttgtgggacaaagaatcttagagaagcaacggggacacaggctgtccagtgcagcaccagtgaattcaccaagatgaagagttgagcacagagtgtgagacaaggatttgcaatgaggagtcatttaccatgagcgtgtatacatgactcaatattgtatatttaagggagtagagcacagtcattgaaaacatggggttgaagcagaagtcctggctctagcactattgtaaaaacactggcaagttccctaacttttgtggattcctctgtgtttgaatgggaaagtggtacccatctcctggcctgtgtgtgatcatcgaatgagacacatgtaagaggctctgcacatcgcagacatgcaatacacactggctatcaccagctagttatcacacatgctcccaggccctggtcattgtcagaaccttcctccccatctctatttctgtgtatagactctgtagtttctgtaatgatcagatggctgcccgtcctctgattatcttctcctcataccccaacaggatgagtgcacttttccttggtgtgggagtgagggcagaggaagctggagcgaggtgagtgtctgcaaatagcagatgatgggggctcagtgatagacaaacaatctggtttaggttggtcttggtgtttgcttccaccccagagagatttgcagagccccggctgctcaagcaagcctccctctgtccactggtggctcacatttgatcccacaatttgttttctcctcctcaagggtgcaacaaaacgttccaagtgggacagatactggagatcctcaaagtaagcccctcggtgactgggctgctggcaccatggacccaggtaggctcacctcctcttccctgctggttcctactcgcacttagaatggagggtggcacctccacagctgagtgagccccagaagaacccggatggactaggaggccaatgagtctgcccaaagcagcagaagaggtcacgtggagtcccccgacccaggggtctgggggtcatctgcatcctgacctctccttagggtgacacggcccaggtgcccacttcctccctaccctggcacctagcaaatgactcaagtggggcaggacatccttggggaagtggaatcagcgggggggggggggagtgtggggagagcagggtccaggaggagaggagggctgggagaggaggttgaccagcagccccgacctgtcacctcccgctctgctccaagctgaccctggggtgtttccacctgaggctggtcccctccctccagctcttgccctgccctagcccctttgctctgagtggccctgtgggaatgtatcgggcctgattcagcttccagcttaactggaccccggtctgtcctttgccacatcccctctgtgtgacctggcgctccttacctcccttctcctgtaccatgagaataatatttccccatgttgtcttgaggatcaaatataacacggctacctggcctggccagtgcctgccacacaatagggcctccctaagggctggttcccatcccctctactggtcccctgttgattccaggtggaagccaccccgtccccccccagctgtgttagggcacccgccctgccctgcccatcacaagcacctgcttaccagggatgactgcctcaggcaggggctgagttcagtcatctaaaatacccccggtcaaagaaaaatctgaggcccaatagaattttaaagagttaattgagtaagaaaggattgctgaattgggaaacagcaaactggaggaggcttcgtgctatggtgaaaaagtgtcggagacaaggtttatcgggtgaatatgaaactgcagtaaggacattatttgattggttgcacttacaaaactgcctgtttgggtttaccttgttggaaaatccctggtcacgttggtgccagtgtgagtttagggaggtctccgaatacaggtgagaccggaacttagccttgcccaggtttttgatgctgaagagagaaaaaagtcaaagcaaaagcaaatcagcttttagtgcaaaacagaagtgcaggctcaggggtgggagtgcaggcggactcagaagagccagtcgggcccagtggagtttggggttcttgtctttgctggtttattaaattaaggtgtggagtaagcataaggatttctgggaagaggtggggatttcttggaattgggagggcaatgcagttttgtaccaaacatgggcatacatggaacggctgtggtgcgggtgggtgtggggtttagtgagacaaggagggtatgattgagtgtgaggcaaaacgtgggtcagacccagcgccgagttggatctcactggtcttagctgaattggccacttcctgtttgtcaggatcctgtgggcccatcccctccccctgtccctacaggtggtttcagcaactccttctgtgtctgtcatgtgaacctgctgcctggagttcttgtttcttctgtgacctcccagtatccacatctcagcatggccctctgtcagctggctttaagttttgtttgtatctaacagaagtacccatctgatatgaccccagttgagtttcccatagcttgcagtttcagggggttacagctgttctaaaggcctcgtaggtattgcctgtccaggaatgtttcagggctggtttttgttttaattttgcttttatatccaccagccccaccacatcaagaaatacacagatttagtgccagaggttccttccatccaaacctgggtttccttcctccttttggtgaagaaggaaaaagaaaaaacaagacaatcgctcgcccagccaagtcagcattgcgttcatttccctaagccccatttcctcaggagggcttcctccccttacagagttgccacggcaaccaagtcagctctgctcaggagccgccctggacagcaaactgggctgtgctgagtcctgtccaagacgaggggagggcagggaagattagaagccgagagcactcagccgaccccggaatccttacgaagggctgggctgggggactgaggaaaaactctccccccaaaacaagatgatctgtggtttaataacaggcccagctgggtccagaggtgacagtggagagccgtgtaccctgagaccagcctgcagaggacagaggcaacatggaggtgcctcaaggatcagtgctgagggtcccgcccccatgccccgtcgaagaaccccctccactgcccatctgagagtgcccaagaccagcaggaggaatctcctttgcatggtagttgtactcaatgctgtggagtttgagacattatttttaaactttaaatagccccacaggtaagctataagggagaatgcagagaccacaggcattttcaaaacataaggagttttaatgttaaggagtttaaggagaatgtcaaagaaacattggccttggagtcaaatcctgagcttcctgcttgatggttttgggcggtgactctcgctgtctggattttactttcttcatctgtgaattaagaatgaggtggccgggcactgtggctcacgcctgtaatcccaacatttgggaggccgaggcgggcagatcacaaggtcaggagatcgagacgatcctgtctaacacgatgaaaccctgtctctactaaaaatacaaaaaaaattaccaggcctggtggcaggcgcctgtagtcccagctactcaggaggctgaggcaggagaatggcatgaacccaggaggcagagcttgcagtgagccaagatcgcaccactgcactccagcctgggtgagagagcaagactccatccccccaaaaaaaagaatgaggtctcttgtgtgtgcacggcaagaaacaattttacatcatgcctcagtgcacacacaaatacatactggtccccagttccttatctgcaattccataattcccagatccctgcaaaccacacgttttggtggcagctgacttcaggagtaatcctgctctgtactgacttgagttctttgtagacctaccattattttttacatttaatgtgaatatttgcttgtttcactgttgaaacatgtgtgggtgtgattacagggagcagtccagcctctgctgggaatggtcaggaatataccatatgcaccccgtgtcctttctaaaatagtggaaattctgaatgcctaaacacatctggattccaggaatttacattaagggatatatatttgaaataacccacaaaaacaatactcacccctgctacgcttggtacactctgatattttcaaattgattttctttttaaaatgctgcttttgaaccaataatttcataacccaatgatgtgttgatattcacattttgaagacactggtataaagtgtttgacccaacaggcatgtggcagatggaagtgatcactgggatgtttccacttccttggcctggaaggctcacttcatgttggtgctgagctgaaaaggattcattcctctccaaagcaccatggcactcccctggtgtttcaatgttctcaggctgccatagtaaaatatcacaggctgggtgacttcaacatctggcttttattttctcacagatccagaggcaagaagtccaaggtgaaggtgccaaaagggttggagtctggggaggactctcttgctggcttatggaagctgcctttgcactgtgtgctcacacagtcttcttgtgtccctttctgttcttacaataggacactagccctctaatagaattagagccctacccttgtgatctcattcagtcttaattgcttccttaaaggccagatctccaaatgtagtcacctgagtttaaagcttcagcatatgaattttgggggcacacaattccctctatagcactaatgactccataaaacaagtcccacatcacagctgtccaggaaaattaacatgtagtcatctcttatgcaatggctgttatgcactcccacactttcctccaaccttatcctttcttctttccaactagagagcagtatctttattgaggatgccattaagtatttcaaggaaaaagtgagcacacagaatctgctactcctgctgactgataatgaggcctggaacggattcgtggctgctgctgaactgcccaggtaagctccatggggttacctccattgggcactccggcgatgccacccagctctcccctgggctagttttccctgacaggcacacctcctccaggcagccccctctgctgggcttgaggatgaccttcttggcactccaggaagaatatttcctccatgtccttcgctggcagtgagtagcctcaggctgaggggataggaagcccacaggaacagggtcatttctgccatctgctggtgatgggaactttgccagttactttctcactttcagcctttcttcatcaatggagttttattgtgagaaaaatgagatcgtgcatgtaaagtgcttagcataatgactgacacacagtaggtgcacagttaacgttaacatcttacaagcttggtggaaacagaaccagggttaaggatcttcttcttgaagatgggagcccagcaggacttgacctttgggacaagtcagaaaaatcctgacctaaccaatgtgtgttcctggggatgctggctggagccctttttctcatctgaggaattccataaacacggcaggacccttctgctggtccaggatgccgagaggctggagtggagttgcacagcgctgggtctctttccagctctgtctgtgtccagtccctgggctctgggcttatgtcagagactggaaactgtcatcagtctaataggaatagcaactcaatgtgataggagtgtggtgaaggccttagaggcaactccaggtcaaaggtggggaaccaacaccaagatcctgcccaaaggcccagagagaccgggatcagcgtcagagcctggagtcaggatggagcaagagtcagccttggttgtaggacaagcaggaaggctggggcaccagggctgggactagggtgtggaaagagaggcaccaagggcttgaaacttaaggaggtcatgaacttgcagaggacatgtgagtgggagagggatatttcttccctgtctggatgatcccaacactcatgggcatatagggtcatggttgcctgtgtctctcacaccacgccttggaactggcaagttctgggctaccctttgagaccttcttctcttctacacagagaaacccctgacattgacaagcagtatgtcttagtgaccattttcatagtagaattagttgctgccaatttgtgtaatttcagggatactgagcagactcacaacttcccaaccaaggaggaaaacacttcctctaccatcttgtccaaattcaggtcttttcagcattagcaatttatataggtggttctgaaagtgttttgaatcttctagaggttccataaaattgcaaatggccttggtgtgcacacaggtgaagctgtcactactaaggcatcagttaggctggtgacacctgcgagtgagacctggaaggttgggggtgcaggtggtaggtcaggaggcagtaaggtggctggagcgtccatgtggagccagaatgaatagccagatctcccactccagtcagctggggcagtggccagaaccagtagccttcagccaggtgaaagggcatgaggcattggaagggagcagatgccaggcaaagtgaactcctgtctctccggggttttgtttttgtttgaattcaaagtactcagagatagccagactgcaatgtctgagggcacccttacctttgacaccacctgcaaatttaaggggatttctaaatccatcctttgattttgtaattcactggaaggactcacataactcactgaaaactgctatttcacaattgtggttgatcacacggaaagaacacagattaaaatcagcctaagaaagagacacacggggcagagtttgggagggttttaagtgtgaagcttcattgtcctcaggacgctgtgttctcctgtgtgaatgtgggacaaaacacatgcggtgttgccaaccagggaagctcacccagttaaggaaaaattcctgtgaatcacattaaaccagaaatgaagccttttttcaggattgttgttacaggggagggagactgagcccagctccaaatatagtaaagacagagggggagtcacagccaacaccagggtgggggcgggagatggaacaggactgataggagacaccagagtggggggttcctgctaaattggcctaacaggattctcactaaaggcaggtcagacactcacccatcaatggtgggggtgaagagcataatcagatagcaaagcgtaatcagacagcaaggggggaagaccctccctaaactgacttggggagattcttgctgagctgggtggtgcaggtccagcaagcagtgggtggctgtggaaggccaaggtcggcgcctagtggagaagaggctcagaagagcccagctggagttggtcaaggagaaagtccttctttctcaacccatgccttagtgtccagagtatctgctggggctggatcacaagctgccctcatggctgacctggagtctccagcccctccctgaggtctaacccctttagtccccgggtcctctgggatcaggaaagacaccaaatagccccaaaccccatcatccatcagattcctatacggtcccgtggccaaatcaccaggcaaagacagatgttcctaccaggcaggacattccaggggcctggagatcacttcccaggagctgaggacaaagggaaggcctctctttgggtaaagttcatgcttcactttcctgccatcctgggaataaggtctctttgtctcactctcactgctctttgttcatctgcagagttttccctctccaaacactttggcagtcacggtgttgacctgcccttgaatgaggaggcatctttatcaaacacctaccatgaaagagcatctgagatgcctttaagatatttatttccatatggaataaatattgaggagtatctatgatgaacaaaatgtgtttgagtttgaaagataattaattccatttgtaaaatttgtttctatttgatcgatagtgaaagctctgcaatttacacaggatagagatcacatggagctcatttcacagacagggaaactgcatttcttttttttttttttttttttgagttggagtcttgctctgtcgcccaagctggagtgcagtggcgcgatctcggctcactgcaagctctgcctcccggttcaagcaattctcctgcctcagcctcctgagtagctgggactacaggcgcccaccaccacgcccggctaattttttgaatttttggtagagacagggtttcaccgtattagtcaggatggtctcaatctcctgaccttgtgatccacccgccttggcctcccaaagtgctgggattacaggtgtgagccaccacaccgagccaaaactgcatttcttaatcctttaacctttccttgtgcaggaatgaggcagatgagctccgtaaagctctggacaaccttgcaagacaaatgatcatgaaagacaaaaactggcacgataaaggccagcagtacagaaactggtttctgaaagagtttcctcggttgaaaagtgagcttgaggataacataagaaggctccgtgcccttgcagatggggttcagaaggtccacaaaggcaccaccatcgccaatgtggtgtctggctctctcagcatttcctctggcatcctgaccctcgtcggcatgggtctggcacccttcacagagggaggcagccttgtactcttggaacctgggatggagttgggaatcacagccgctttgaccgggattaccagcagtaccatggactacggaaagaagtggtggacacaagcccaagcccacgacctggtcatcaaaagccttgacaaattgaaggaggtgagggagtttttgggtgagaacatatccaactttctttccttagctggcaatacttaccaactcacacgaggcattgggaaggacatccgtgccctcagacgagccagagccaatcttcagtcagtaccgcatgcctcagcctcacgcccccgggtcactgagccaatctcagctgaaagcggtgaacaggtggagagggttaatgaacccagcatcctggaaatgagcagaggagtcaagctcacggatgtggcccctgtaagcttctttcttgtgctggatgtagtctacctcgtgtacgaatcaaagcacttacatgagggggcaaagtcagagacagctgaggagctgaagaaggtggctcaggagctggaggagaagctaaacattctcaacaataattataagattctgcaggcggaccaagaactgtgaccacagggcagggcagccaccaggagagatatgcctggcaggggccaggacaaaatgcaaacttttttttttttctgagacagagtcttgctctgtcgccaagttggagtgcaatggtgcgatctcagctcactgcaagctctgcctcccgtgttcaagcgattctcctgccttggcctcccaagtagctgggactacaggcgcctaccaccatgcccagctaatttttgtatttttaatagagatggggtttcaccatgttggccaggatggtctcgatctcctgacctcttgatctgcccaccttggcctcccaaagtgctgggattacaggcgtgagccatcgcttttgacccaaatgcaaacattttattagggggataaagagggtgaggtaaagtttatggaactgagtgttagggactttggcatttccatagctgagcacagcaggggaggggttaatgcagatggcagtgcagcaaggagaaggcaggaacattggagcctgcaataagggaaaaatgggaactggagagtgtggggaatgggaagaagcagtttactttagactaaagaatatattggggggccgggtgtagtggctcatgcctgtaatccgagcactttgggaggccaaggcgggcggatcacgaggtcaggagatcgagaccatcctggctaacacagtgaaaccccgtctctactaaaaatacaaaaaattagccgggcatggtggcgggcgcctgtagttccagctaactgggcggctgaggcaggagaatggcgtgaacctgggaggtggagcttgcagtgagccgagatatcgccactgcactccagcctgggtgacagagcgagactccatctcaaaaaaaaaaaaaaaaagaatatattgacggaagaatagagaggaggcttgaaggaaccagcaatgagaaggccaggaaaagaaagagctgaaaatggagaaagcccaagagttagaacagttggatacaggagaagaaacagcggctccactacagacccagccccaggttcaatgtcctccgaagaatgaagtctttccctggtgatggtcccctgccctgtctttccagcatccactctcccttgtcctcctgggggcatatctcagtcaggcagcggcttcctgatgatggtcattggggtggttgtcatgtgatgggtcccctccaggttactaaagggtgcatgtcccctgcttgaacactgaagggcaggtggtgggccatggccatggtccccagctgaggagcaggtgtccctgagaacccaaacttcccagagagtatgtgagaaccaaccaatgaaaacagtcccatcgctcttacccggtaagtaaacagtcagaaaattagcatgaaagcagtttagcattgggaggaagctcagatctctagagctgtcttgtcgccgcccaggattgacctgtgtgtaagtcccaataaactcacctactcatcaagctggacttgttcgagtcattctttggtctctcagctctttccaagctttgggggccatcagtctcaagtttttctcgtaatggtggtgatggtggttgtgatggcagcagagtggtgggggccttggcaagtggtcggtgctcttccagaccaggggacaccgatggaccgatgaagttccaggggaacttgaagtgctgtgttggaaagaggttaatttgggaagaaaggaaaaatgaaaggagatgccaggaacaggtcaaggaaccttgaggtgtgtccaggagttcaaccccgcttgtggtcacgagacctcgcctctctgagcctcagtttcctcatcagctgtagaagggtacctggacaaggtgatgtctcaggtccacccagctctccccatcttgtgtcctggagacttgggtccaatcagcactgactgatggctgtgcctttgtggtgccgatggaggctcccctgggctctgggtgcctgacttcccttcctcatgatccttcttccagggtctcgggaaacgaggcttccatggcccctcctgcttgctcactggactctcactttcccagctggtcatttccctgagacctcaaaaccccaccaaccccactggggcacccacagaaagcttgtacatgtctggctctggctgagcacaggtgtggtttccatctgcgagtcagagcccgggattgacatgggacgctcgaggctgactagtgtcagaggggcctgtgtgcagattgggagaagattatcgagtaatagaggggcaaagagggacatccagacagcaaacacccccatccagtctgtcctcacgttttgcccagactcctgcaagaacttccagaatggtcttccatgtgcaactgcccgtccctgcccatgtcctggatcattctccacactgcgccaggttgggctttaacaagatcatgttttgggtttttgggggttttttgtttgtttgtttggtctcactctgttgtgaggctggcgtcccgtggcatgagcatggctcactgcatcttggacctcccggcctcaaactacccttccaccttgaccccctgagtagctgggaccatccgtgtgtgccacattgcccaggctggtctcaaactcctgagttcaggtgatctgttcgccttggcattccaatgggctgcaattacagacacgagccaccgtgcccacctaagaacatagatttgatcgagcacccacttctgaccattcaatggcttcccattactcttagcacaaagatgtaggccatgatgctgcctaaagtagcctgttgcggcctggggtcctgtgaaggaagagccagaggcaacgttctggtgcagagggtttctaggaagtgattctaggagcagaactgaggatccaggagggaaggaggaaacgttgatacaagaagtttttgaatgggccatccatatgggcaatgagaccttctgaggtgccttcaaggagcgtcctcagaatctttgtttccagggaggagacatggaggcctttatccactgctttagctgtgtcccaggggttctggtacattgtgtctttgttctcattggtttcaaagaacttcttgatttctgccttaattttgttatttacccagtaatcattcaggaacacgttgttcaatttccatgtagttgtgcggtttttagtgagtttcttaatcctgagttctaatttgattgcactgtggtctgagacactgtttgttatgatttccattcttttgcatttgctgaggaatgttttacttccaattatgtggtcgactttagaataagtgttatacggtgctgagaagaaagtatattctgttgatttgggacggagagttctgtagatgtctgttaggtccactcagtccagggctgagttcaagtcctgaacatccttgttaattttctgtctcgttgacctgtctaatattgacagtggggtgttaaagtctcccactgctattgtgtgggagtctaagtctctttgtaggtctctaagaacttgttttatgaatctgcgtgctcccgtattgggtgcatatatatttaggatagttagctcttcttgttgcactgatgtttgttggtttaaaagatcttttttgatctttgttggtttaaagtctgttttatcagagactaggattgcaacccctgcttttttgtttgtttgtttgtttgtttgttttgctttccatttgcttggtaaatgttcctccatccctttattttcagcctatgtgtgtttttgcacatgagatgggtctcctgaatacagtacatcaacgggtcttgactttatccaatttgccagtctgtctgttttaattggggcatttagcccatttacatttaaggttcatattgttatgtgtgaatttgatcctgtcatcatgatgctagctgattattttgcacattagttgatgcagtttcttcatggtatcattggtctttatattttggtgtggttttgcagtgtctggtactggtttttcctttccatatttagtgcttccttcaggagctcatgtaaggccggcctggtggtgacaaaatccctcagcatttgcttgtctggaaaggattttatttctcctttgcttatgaagcttagtttggctggatatgaaattctgggttgaaaattcttttctttaagaatgttgaatattggtccccactctcttccagcttatatagggtttctgcagagagatccactgttagtctgatgggcttcccttcgtaggtaacgtgatctttctctctggctgcccttaacattttttccttcgtttcaaccttggagaatctgatgattatgtgtcttggggttgctcttcttgaagagtatcttagtggtgttctctgtatttcctgaatttgaatgttggcctggcttgctggttggggaagttctcctggataatatcctaaagtgtgttttccagcttgtttccgttctccccatcactttcaggtacaccaatcaattgtaggtttaatcttttcacatagtcccatatttcttggaggctttatttgttccattgtcattcttttttctctaattttgtcttcacacattgtttcagtaagttgatcttcaatctttgatattccgcttgatcaatttggctattgatagttgtgtatccttcacgaagttctcatgctgtgtttttcagctccatcaggtcatttacgttcttctctaaactggttattctagttagcagctcctgtaacctttcatcaaggttcttagcttccttgcattgggttacaacatgctcctttagctcagaggagtttctcattacccatcttctgaagcctacttctgtcaattcgtcaaattcattctccatccagttttgtgcccttgctggagaggagttgcaatcatttggagaagagacat

SEQ ID NO: 10 - DNA, 23 bp, synthetic construct
  misc_feature 1..23: note = Primer
  source 1..23: mol_type = other DNA
gctactcctgctgactgataatg

SEQ ID NO: 11 - DNA, 21 bp, synthetic construct
  misc_feature 1..21: note = Primer
  source 1..21: mol_type = other DNA
aaggttgtccagagctttacg

SEQ ID NO: 12 - DNA, 23 bp, synthetic construct
  misc_feature 1..23: note = Probe
  source 1..23: mol_type = other DNA
tgcccaggaatgaggcagatgag

SEQ ID NO: 13 - DNA, 16 bp, synthetic construct
  misc_feature 1..16: note = Synthetic oligonucleotide
  source 1..16: mol_type = other DNA
gttcaaaagcagcatt

SEQ ID NO: 14 - DNA, 16 bp, synthetic construct
  misc_feature 1..16: note = Synthetic oligonucleotide
  source 1..16: mol_type = other DNA
aagatataccgaggaa

SEQ ID NO: 15 - DNA, 16 bp, synthetic construct
  misc_feature 1..16: note = Synthetic oligonucleotide
  source 1..16: mol_type = other DNA
tcccctggcagagact

SEQ ID NO: 16 - DNA, 16 bp, synthetic construct
  misc_feature 1..16: note = Synthetic oligonucleotide
  source 1..16: mol_type = other DNA
tcgctccagcttcctc

SEQ ID NO: 17 - DNA, 16 bp, synthetic construct
  misc_feature 1..16: note = Synthetic oligonucleotide
  source 1..16: mol_type = other DNA
ttactttgaggatctc

SEQ ID NO: 18 - DNA, 16 bp, synthetic construct
  misc_feature 1..16: note = Synthetic oligonucleotide
  source 1..16: mol_type = other DNA
actgctggcctttatc

SEQ ID NO: 19 - DNA, 16 bp, synthetic construct
  misc_feature 1..16: note = Synthetic oligonucleotide
  source 1..16: mol_type = other DNA
ggagccttcttatgtt

SEQ ID NO: 20 - DNA, 16 bp, synthetic construct
  misc_feature 1..16: note = Synthetic oligonucleotide
  source 1..16: mol_type = other DNA
ggtgcctttgtggacc

SEQ ID NO: 21 - DNA, 16 bp, synthetic construct
  misc_feature 1..16: note = Synthetic oligonucleotide
  source 1..16: mol_type = other DNA
agacccatgccgacga

SEQ ID NO: 22 - DNA, 16 bp, synthetic construct
  misc_feature 1..16: note = Synthetic oligonucleotide
  source 1..16: mol_type = other DNA
agcggctgtgattccc

SEQ ID NO: 23 - DNA, 16 bp, synthetic construct
  misc_feature 1..16: note = Synthetic oligonucleotide
  source 1..16: mol_type = other DNA
ctttccgtagtccatg

SEQ ID NO: 24 - DNA, 16 bp, synthetic construct
  misc_feature 1..16: note = Synthetic oligonucleotide
  source 1..16: mol_type = other DNA
acccaaaaactccctc

SEQ ID NO: 25 - DNA, 16 bp, synthetic construct
  misc_feature 1..16: note = Synthetic oligonucleotide
  source 1..16: mol_type = other DNA
gcacggatgtccttcc

SEQ ID NO: 26 - DNA, 16 bp, synthetic construct
  misc_feature 1..16: note = Synthetic oligonucleotide
  source 1..16: mol_type = other DNA
gattggctcagtgacc

SEQ ID NO: 27 - DNA, 16 bp, synthetic construct
  misc_feature 1..16: note = Synthetic oligonucleotide
  source 1..16: mol_type = other DNA
tgggttcattaaccct

SEQ ID NO: 28 - DNA, 16 bp, synthetic construct
  misc_feature 1..16: note = Synthetic oligonucleotide
  source 1..16: mol_type = other DNA
acgaggtagactacat

SEQ ID NO: 29 - DNA, 16 bp, synthetic construct
  misc_feature 1..16: note = Synthetic oligonucleotide
  source 1..16: mol_type = other DNA
ttcttggtccgcctgc

SEQ ID NO: 30 - DNA, 16 bp, synthetic construct
  misc_feature 1..16: note = Synthetic oligonucleotide
  source 1..16: mol_type = other DNA
aatgtttgcatttggg

SEQ ID NO: 31 - DNA, 16 bp, synthetic construct
  misc_feature 1..16: note = Synthetic oligonucleotide
  source 1..16: mol_type = other DNA
gtgctcagctatggaa

SEQ ID NO: 32 - DNA, 16 bp, synthetic construct
  misc_feature 1..16: note = Synthetic oligonucleotide
  source 1..16: mol_type = other DNA
tagtctaaagtaaact

SEQ ID NO: 33 - DNA, 16 bp, synthetic construct
  misc_feature 1..16: note = Synthetic oligonucleotide
  source 1..16: mol_type = other DNA
gctggttccttcaagc

SEQ ID NO: 34 - DNA, 16 bp, synthetic construct
  misc_feature 1..16: note = Synthetic oligonucleotide
  source 1..16: mol_type = other DNA
cattcttcggaggaca

SEQ ID NO: 35 - DNA, 16 bp, synthetic construct
  misc_feature 1..16: note = Synthetic oligonucleotide
  source 1..16: mol_type = other DNA
tcaggaagccgctgcc

SEQ ID NO: 36 - DNA, 16 bp, synthetic construct
  misc_feature 1..16: note = Synthetic oligonucleotide
  source 1..16: mol_type = other DNA
acctgcccttcagtgt

SEQ ID NO: 37 - DNA, 16 bp, synthetic construct
  misc_feature 1..16: note = Synthetic oligonucleotide
  source 1..16: mol_type = other DNA
ctgtttacttaccggg

SEQ ID NO: 38 - DNA, 16 bp, synthetic construct
  misc_feature 1..16: note = Synthetic oligonucleotide
  source 1..16: mol_type = other DNA
tcaatcctgggcggcg

SEQ ID NO: 39 - DNA, 16 bp, synthetic construct
  misc_feature 1..16: note = Synthetic oligonucleotide
  source 1..16: mol_type = other DNA
catgattgcaaagctg

SEQ ID NO: 40 - DNA, 16 bp, synthetic construct
  misc_feature 1..16: note = Synthetic oligonucleotide
  source 1..16: mol_type = other DNA
gctttgtgaacccatc

SEQ ID NO: 41 - DNA, 16 bp, synthetic construct
  misc_feature 1..16: note = Synthetic oligonucleotide
  source 1..16: mol_type = other DNA
caagcccagtccaatt

SEQ ID NO: 42 - DNA, 16 bp, synthetic construct
  misc_feature 1..16: note = Synthetic oligonucleotide
  source 1..16: mol_type = other DNA
gatgtttgtcttctgg

SEQ ID NO: 43 - DNA, 16 bp, synthetic construct
  misc_feature 1..16: note = Synthetic oligonucleotide
  source 1..16: mol_type = other DNA
gccagtgtgtattgca

SEQ ID NO: 44 - DNA, 16 bp, synthetic construct
  misc_feature 1..16: note = Synthetic oligonucleotide
  source 1..16: mol_type = other DNA
acaaattgtgggatca

SEQ ID NO: 45 - DNA, 16 bp, synthetic construct
  misc_feature 1..16: note = Synthetic oligonucleotide
  source 1..16: mol_type = other DNA
ctaggtgccagggtag

SEQ ID NO: 46 - DNA, 16 bp, synthetic construct
  misc_feature 1..16: note = Synthetic oligonucleotide
  source 1..16: mol_type = other DNA
ccccccccccgctgat

SEQ ID NO: 47 - DNA, 16 bp, synthetic construct
  misc_feature 1..16: note = Synthetic oligonucleotide
  source 1..16: mol_type = other DNA
gggccactcagagcaa

SEQ ID NO: 48 - DNA, 16 bp, synthetic construct
  misc_feature 1..16: note = Synthetic oligonucleotide
  source 1..16: mol_type = other DNA
gtggcaaaggacagac

SEQ ID NO: 49 - DNA, 16 bp, synthetic construct
  misc_feature 1..16: note = Synthetic oligonucleotide
  source 1..16: mol_type = other DNA
ccctattgtgtggcag

SEQ ID NO: 50 - DNA, 16 bp, synthetic construct
  misc_feature 1..16: note = Synthetic oligonucleotide
  source 1..16: mol_type = other DNA
tttttctttgaccggg

SEQ ID NO: 51 - DNA, 16 bp, synthetic construct
  misc_feature 1..16: note = Synthetic oligonucleotide
  source 1..16: mol_type = other DNA
cgaagcctcctccagt

SEQ ID NO: 52 - DNA, 16 bp, synthetic construct
  misc_feature 1..16: note = Synthetic oligonucleotide
  source 1..16: mol_type = other DNA
cacccgataaaccttg

SEQ ID NO: 53 - DNA, 16 bp, synthetic construct
  misc_feature 1..16: note = Synthetic oligonucleotide
  source 1..16: mol_type = other DNA
aggcagttttgtaagt

SEQ ID NO: 54 - DNA, 16 bp, synthetic construct
  misc_feature 1..16: note = Synthetic oligonucleotide
  source 1..16: mol_type = other DNA
attcggagacctccct

SEQ ID NO: 55 - DNA, 16 bp, synthetic construct
  misc_feature 1..16: note = Synthetic oligonucleotide
  source 1..16: mol_type = other DNA
cctgggcaaggctaag

SEQ ID NO: 56 - DNA, 16 bp, synthetic construct
  misc_feature 1..16: note = Synthetic oligonucleotide
  source 1..16: mol_type = other DNA
ttactccacaccttaa

SEQ ID NO: 57 - DNA, 16 bp, synthetic construct
  misc_feature 1..16: note = Synthetic oligonucleotide
  source 1..16: mol_type = other DNA
tttggtacaaaactgc

SEQ ID NO: 58 - DNA, 16 bp, synthetic construct
  misc_feature 1..16: note = Synthetic oligonucleotide
  source 1..16: mol_type = other DNA
tgtctcactaaacccc

SEQ ID NO: 59 - DNA, 16 bp, synthetic construct
  misc_feature 1..16: note = Synthetic oligonucleotide
  source 1..16: mol_type = other DNA
gaccagtgagatccaa

SEQ ID NO: 60 - DNA, 16 bp, synthetic construct
  misc_feature 1..16: note = Synthetic oligonucleotide
  source 1..16: mol_type = other DNA
accacctgtagggaca

SEQ ID NO: 61 - DNA, 16 bp, synthetic construct
  misc_feature 1..16: note = Synthetic oligonucleotide
  source 1..16: mol_type = other DNA
gggtacttctgttaga

SEQ ID NO: 62 - DNA, 16 bp, synthetic construct
  misc_feature 1..16: note = Synthetic oligonucleotide
  source 1..16: mol_type = other DNA
cagctgtaaccccctg

SEQ ID NO: 63 - DNA, 16 bp, synthetic construct
  misc_feature 1..16: note = Synthetic oligonucleotide
  source 1..16: mol_type = other DNA
cagccctgaaacattc

SEQ ID NO: 64 - DNA, 16 bp, synthetic construct
  misc_feature 1..16: note = Synthetic oligonucleotide
  source 1..16: mol_type = other DNA
gcgattgtcttgtttt

SEQ ID NO: 65 - DNA, 16 bp, synthetic construct
  misc_feature 1..16: note = Synthetic oligonucleotide
  source 1..16: mol_type = other DNA
gccgtggcaactctgt

SEQ ID NO: 66 - DNA, 16 bp, synthetic construct
  misc_feature 1..16: note = Synthetic oligonucleotide
  source 1..16: mol_type = other DNA
gggtcggctgagtgct

SEQ ID NO: 67 - DNA, 16 bp, synthetic construct
  misc_feature 1..16: note = Synthetic oligonucleotide
  source 1..16: mol_type = other DNA
acctccatgttgcctc

SEQ ID NO: 68 - DNA, 16 bp, synthetic construct
  misc_feature 1..16: note = Synthetic oligonucleotide
  source 1..16: mol_type = other DNA
gctggtcttgggcact

SEQ ID NO: 69 - DNA, 16 bp, synthetic construct
  misc_feature 1..16: note = Synthetic oligonucleotide
  source 1..16: mol_type = other DNA
cttatagcttacctgt

SEQ ID NO: 70 - DNA, 16 bp, synthetic construct
  misc_feature 1..16: note = Synthetic oligonucleotide
  source 1..16: mol_type = other DNA
gagtcaccgcccaaaa

SEQ ID NO: 71 - DNA, 16 bp, synthetic construct
  misc_feature 1..16: note = Synthetic oligonucleotide
  source 1..16: mol_type = other DNA
ttgccgtgcacacaca

SEQ ID NO: 72 - DNA, 16 bp, synthetic construct
  misc_feature 1..16: note = Synthetic oligonucleotide
  source 1..16: mol_type = other DNA
gtttgcagggatctgg

SEQ ID NO: 73 - DNA, 16 bp, synthetic construct
  misc_feature 1..16: note = Synthetic oligonucleotide
  source 1..16: mol_type = other DNA
caaagaactcaagtca

SEQ ID NO: 74 - DNA, 16 bp, synthetic construct
  misc_feature 1..16: note = Synthetic oligonucleotide
  source 1..16: mol_type = other DNA
actgctccctgtaatc

SEQ ID NO: 75 - DNA, 16 bp, synthetic construct
  misc_feature 1..16: note = Synthetic oligonucleotide
  source 1..16: mol_type = other DNA
tgtgtttaggcattca

SEQ ID NO: 76 - DNA, 16 bp, synthetic construct
  misc_feature 1..16: note = Synthetic oligonucleotide
  source 1..16: mol_type = other DNA
gttatgaaattattgg

SEQ ID NO: 77 - DNA, 16 bp, synthetic construct
  misc_feature 1..16: note = Synthetic oligonucleotide
  source 1..16: mol_type = other DNA
atgcctgttgggtcaa

SEQ ID NO: 78 - DNA, 16 bp, synthetic construct
  misc_feature 1..16: note = Synthetic oligonucleotide
  source 1..16: mol_type = other DNA
gcaccaacatgaagtg

SEQ ID NO: 79 - DNA, 16 bp, synthetic construct
  misc_feature 1..16: note = Synthetic oligonucleotide
  source 1..16: mol_type = other DNA
acccttttggcacctt

SEQ ID NO: 80 - DNA, 16 bp, synthetic construct
  misc_feature 1..16: note = Synthetic oligonucleotide
  source 1..16: mol_type = other DNA
ttctattagagggcta

SEQ ID NO: 81 - DNA, 16 bp, synthetic construct
  misc_feature 1..16: note = Synthetic oligonucleotide
  source 1..16: mol_type = other DNA
gctttaaactcaggtg

SEQ ID NO: 82 - DNA, 16 bp, synthetic construct
  misc_feature 1..16: note = Synthetic oligonucleotide
  source 1..16: mol_type = other DNA
gttttatggagtcatt

SEQ ID NO: 83 - DNA, 16 bp, synthetic construct
  misc_feature 1..16: note = Synthetic oligonucleotide
  source 1..16: mol_type = other DNA
gtgcataacagccatt

SEQ ID NO: 84 - DNA, 16 bp, synthetic construct
  misc_feature 1..16: note = Synthetic oligonucleotide
  source 1..16: mol_type = other DNA
agatataccgaggaat

SEQ ID NO: 85 - DNA, 16 bp, synthetic construct
  misc_feature 1..16: note = Synthetic oligonucleotide
  source 1..16: mol_type = other DNA
ggatcccacctccagt

SEQ ID NO: 86 - DNA, 16 bp, synthetic construct
  misc_feature 1..16: note = Synthetic oligonucleotide
  source 1..16: mol_type = other DNA
actcccacaccaagga

SEQ ID NO: 87 - DNA, 16 bp, synthetic construct
  misc_feature 1..16: note = Synthetic oligonucleotide
  source 1..16: mol_type = other DNA
tactttgaggatctcc

SEQ ID NO: 88 - DNA, 16 bp, synthetic construct
  misc_feature 1..16: note = Synthetic oligonucleotide
  source 1..16: mol_type = other DNA
ctgctggcctttatcg

SEQ ID NO: 89 - DNA, 16 bp, synthetic construct
  misc_feature 1..16: note = Synthetic oligonucleotide
  source 1..16: mol_type = other DNA
gagccttcttatgtta

SEQ ID NO: 90 - DNA, 16 bp, synthetic construct
  misc_feature 1..16: note = Synthetic oligonucleotide
  source 1..16: mol_type = other DNA
gtgcctttgtggacct

SEQ ID NO: 91 - DNA, 16 bp, synthetic construct
  misc_feature 1..16: note = Synthetic oligonucleotide
  source 1..16: mol_type = other DNA
gacccatgccgacgag

SEQ ID NO: 92 - DNA, 16 bp, synthetic construct
  misc_feature 1..16: note = Synthetic oligonucleotide
  source 1..16: mol_type = other DNA
gcggctgtgattccca

SEQ ID NO: 93 - DNA, 16 bp, synthetic construct
  misc_feature 1..16: note = Synthetic oligonucleotide
  source 1..16: mol_type = other DNA
tttccgtagtccatgg

SEQ ID NO: 94 - DNA, 16 bp, synthetic construct
  misc_feature 1..16: note = Synthetic oligonucleotide
  source 1..16: mol_type = other DNA
acctccttcaatttgt

SEQ ID NO: 95 - DNA, 16 bp, synthetic construct
  misc_feature 1..16: note = Synthetic oligonucleotide
  source 1..16: mol_type = other DNA
cacggatgtccttccc

SEQ ID NO: 96 - DNA, 16 bp, synthetic construct
  misc_feature 1..16: note = Synthetic oligonucleotide
  source 1..16: mol_type = other DNA
attggctcagtgaccc

SEQ ID NO: 97 - DNA, 16 bp, synthetic construct
  misc_feature 1..16: note = Synthetic oligonucleotide
  source 1..16: mol_type = other DNA
gggttcattaaccctc

SEQ ID NO: 98 - DNA, 16 bp, synthetic construct
  misc_feature 1..16: note = Synthetic oligonucleotide
  source 1..16: mol_type = other DNA
cgaggtagactacatc

SEQ ID NO: 99 - DNA, 16 bp, synthetic construct
  misc_feature 1..16: note = Synthetic oligonucleotide
  source 1..16: mol_type = other DNA
tcttggtccgcctgca

SEQ ID NO: 100 - DNA, 16 bp, synthetic construct
  misc_feature 1..16: note = Synthetic oligonucleotide
  source 1..16: mol_type = other DNA
tgtttgcatttgggtc

SEQ ID NO: 101 - DNA, 16 bp, synthetic construct
  misc_feature 1..16: note = Synthetic oligonucleotide
  source 1..16: mol_type = other DNA
tgctcagctatggaaa

SEQ ID NO: 102 - DNA, 16 bp, synthetic construct
  misc_feature 1..16: note = Synthetic oligonucleotide
  source 1..16: mol_type = other DNA
agtctaaagtaaactg

SEQ ID NO: 103 - DNA, 16 bp, synthetic construct
  misc_feature 1..16: note = Synthetic oligonucleotide
  source 1..16: mol_type = other DNA
ctggttccttcaagcc

SEQ ID NO: 104 - DNA, 16 bp, synthetic construct
  misc_feature 1..16: note = Synthetic oligonucleotide
  source 1..16: mol_type = other DNA
attcttcggaggacat

SEQ ID NO: 105 - DNA, 16 bp, synthetic construct
  misc_feature 1..16: note = Synthetic oligonucleotide
  source 1..16: mol_type = other DNA
aggaagccgctgcctg

SEQ ID NO: 106 - DNA, 16 bp, synthetic construct
  misc_feature 1..16: note = Synthetic oligonucleotide
  source 1..16: mol_type = other DNA
tgcccttcagtgttca

SEQ ID NO: 107 - DNA, 16 bp, synthetic construct
  misc_feature 1..16: note = Synthetic oligonucleotide
  source 1..16: mol_type = other DNA
tgtttacttaccgggt

SEQ ID NO: 108 - DNA, 16 bp, synthetic construct
  misc_feature 1..16: note = Synthetic oligonucleotide
  source 1..16: mol_type = other DNA
caatcctgggcggcga

SEQ ID NO: 109 - DNA, 16 bp, synthetic construct
  misc_feature 1..16: note = Synthetic oligonucleotide
  source 1..16: mol_type = other DNA
atgattgcaaagctgg

SEQ ID NO: 110 - DNA, 16 bp, synthetic construct
  misc_feature 1..16: note = Synthetic oligonucleotide
  source 1..16: mol_type = other DNA
aacccatctgagctgt

SEQ ID NO: 111 - DNA, 16 bp, synthetic construct
  misc_feature 1..16: note = Synthetic oligonucleotide
  source 1..16: mol_type = other DNA
gcccagtccaattgtg

SEQ ID NO: 112 - DNA, 16 bp, synthetic construct
  misc_feature 1..16: note = Synthetic oligonucleotide
  source 1..16: mol_type = other DNA
actccatgcagcaagg

SEQ ID NO: 113 - DNA, 16 bp, synthetic construct
  misc_feature 1..16: note = Synthetic oligonucleotide
  source 1..16: mol_type = other DNA
gtctgcgatgtgcaga

SEQ ID NO: 114 - DNA, 16 bp, synthetic construct
  misc_feature 1..16: note = Synthetic oligonucleotide
  source 1..16: mol_type = other DNA
tgtgggatcaaatgtg

SEQ ID NO: 115 - DNA, 16 bp, synthetic construct
  misc_feature 1..16: note = Synthetic oligonucleotide
  source 1..16: mol_type = other DNA
taggtgccagggtagg

SEQ ID NO: 116 - DNA, 16 bp, synthetic construct
  misc_feature 1..16: note = Synthetic oligonucleotide
  source 1..16: mol_type = other DNA
cccccccccgctgatt

SEQ ID NO: 117 - DNA, 16 bp, synthetic construct
  misc_feature 1..16: note = Synthetic oligonucleotide
  source 1..16: mol_type = other DNA
ggccactcagagcaaa

SEQ ID NO: 118 - DNA, 16 bp, synthetic construct
  misc_feature 1..16: note = Synthetic oligonucleotide
  source 1..16: mol_type = other DNA
ggcaaaggacagaccg

SEQ ID NO: 119 - DNA, 16 bp, synthetic construct
  misc_feature 1..16: note = Synthetic oligonucleotide
  source 1..16: mol_type = other DNA
ccaggccaggtagccg

SEQ ID NO: 120 - DNA, 16 bp, synthetic construct
  misc_feature 1..16: note = Synthetic oligonucleotide
  source 1..16: mol_type = other DNA
gggtattttagatgac

SEQ ID NO: 121 - DNA, 16 bp, synthetic construct
  misc_feature 1..16: note = Synthetic oligonucleotide
  source 1..16: mol_type = other DNA
gaagcctcctccagtt

SEQ ID NO: 122 - DNA, 16 bp, synthetic construct
  misc_feature 1..16: note = Synthetic oligonucleotide
  source 1..16: mol_type = other DNA
acccgataaaccttgt

SEQ ID NO: 123 - DNA, 16 bp, synthetic construct
  misc_feature 1..16: note = Synthetic oligonucleotide
  source 1..16: mol_type = other DNA
ggcagttttgtaagtg

SEQ ID NO: 124 - DNA, 16 bp, synthetic construct
  misc_feature 1..16: note = Synthetic oligonucleotide
  source 1..16: mol_type = other DNA
ttcggagacctcccta

SEQ ID NO: 125 - DNA, 16 bp, synthetic construct
  misc_feature 1..16: note = Synthetic oligonucleotide
  source 1..16: mol_type = other DNA
ctgggcaaggctaagt

SEQ ID NO: 126 - DNA, 16 bp, synthetic construct
  misc_feature 1..16: note = Synthetic oligonucleotide
  source 1..16: mol_type = other DNA
tactccacaccttaat

SEQ ID NO: 127 - DNA, 16 bp, synthetic construct
  misc_feature 1..16: note = Synthetic oligonucleotide
  source 1..16: mol_type = other DNA
ttggtacaaaactgca

SEQ ID NO: 128 - DNA, 16 bp, synthetic construct
  misc_feature 1..16: note = Synthetic oligonucleotide
  source 1..16: mol_type = other DNA
gtctcactaaacccca

SEQ ID NO: 129 - DNA, 16 bp, synthetic construct
  misc_feature 1..16: note = Synthetic oligonucleotide
  source 1..16: mol_type = other DNA
accagtgagatccaac

SEQ ID NO: 130 - DNA, 16 bp, synthetic construct
  misc_feature 1..16: note = Synthetic oligonucleotide
  source 1..16: mol_type = other DNA
ggatgggcccacagga

SEQ ID NO: 131 - DNA, 16 bp, synthetic construct
  misc_feature 1..16: note = Synthetic oligonucleotide
  source 1..16: mol_type = other DNA
ggtacttctgttagat

SEQ ID NO: 132 - DNA, 16 bp, synthetic construct
  misc_feature 1..16: note = Synthetic oligonucleotide
  source 1..16: mol_type = other DNA
agctgtaaccccctga

SEQ ID NO: 133 - DNA, 16 bp, synthetic construct
  misc_feature 1..16: note = Synthetic oligonucleotide
  source 1..16: mol_type = other DNA
agccctgaaacattcc

SEQ ID NO: 134 - DNA, 16 bp, synthetic construct
  misc_feature 1..16: note = Synthetic oligonucleotide
  source 1..16: mol_type = other DNA
cgattgtcttgttttt

SEQ ID NO: 135 - DNA, 16 bp, synthetic construct
  misc_feature 1..16: note = Synthetic oligonucleotide
  source 1..16: mol_type = other DNA
ccgtggcaactctgta

SEQ ID NO: 136 - DNA, 16 bp, synthetic construct
  misc_feature 1..16: note = Synthetic oligonucleotide
  source 1..16: mol_type = other DNA
gtcggctgagtgctct

SEQ ID NO: 137 - DNA, 16 bp, synthetic construct
  misc_feature 1..16: note = Synthetic oligonucleotide
  source 1..16: mol_type = other DNA
ccatgttgcctctgtc

SEQ ID NO: 138 - DNA, 16 bp, synthetic construct
  misc_feature 1..16: note = Synthetic oligonucleotide
  source 1..16: mol_type = other DNA
ctggtcttgggcactc

SEQ ID NO: 139 - DNA, 16 bp, synthetic construct
  misc_feature 1..16: note = Synthetic oligonucleotide
  source 1..16: mol_type = other DNA
tatagcttacctgtgg

SEQ ID NO: 140 - DNA, 16 bp, synthetic construct
  misc_feature 1..16: note = Synthetic oligonucleotide
  source 1..16: mol_type = other DNA
gtcaccgcccaaaacc

SEQ ID NO: 141 - DNA, 16 bp, synthetic construct
  misc_feature 1..16: note = Synthetic oligonucleotide
  source 1..16: mol_type = other DNA
gccgtgcacacacaag

SEQ ID NO: 142 - DNA, 16 bp, synthetic construct
  misc_feature 1..16: note = Synthetic oligonucleotide
  source 1..16: mol_type = other DNA
ggatctgggaattatg

SEQ ID NO: 143 - DNA, 16 bp, synthetic construct
  misc_feature 1..16: note = Synthetic oligonucleotide
  source 1..16: mol_type = other DNA
aaagaactcaagtcag

SEQ ID NO: 144 - DNA, 16 bp, synthetic construct
  misc_feature 1..16: note = Synthetic oligonucleotide
  source 1..16: mol_type = other DNA
tgctccctgtaatcac

SEQ ID NO: 145 - DNA, 16 bp, synthetic construct
  misc_feature 1..16: note = Synthetic oligonucleotide
  source 1..16: mol_type = other DNA
gtgtttaggcattcag

SEQ ID NO: 146 - DNA, 16 bp, synthetic construct
  misc_feature 1..16: note = Synthetic oligonucleotide
  source 1..16: mol_type = other DNA
atgaaattattggttc

SEQ ID NO: 147 - DNA, 16 bp, synthetic construct
  misc_feature 1..16: note = Synthetic oligonucleotide
  source 1..16: mol_type = other DNA
tgcctgttgggtcaaa

SEQ ID NO: 148 - DNA, 16 bp, synthetic construct
  misc_feature 1..16: note = Synthetic oligonucleotide
  source 1..16: mol_type = other DNA
caccaacatgaagtga

SEQ ID NO: 149 - DNA, 16 bp, synthetic construct
  misc_feature 1..16: note = Synthetic oligonucleotide
  source 1..16: mol_type = other DNA
cccttttggcaccttc

SEQ ID NO: 150 - DNA, 16 bp, synthetic construct
  misc_feature 1..16: note = Synthetic oligonucleotide
  source 1..16: mol_type = other DNA
tctattagagggctag

SEQ ID NO: 151 - DNA, 16 bp, synthetic construct
  misc_feature 1..16: note = Synthetic oligonucleotide
  source 1..16: mol_type = other DNA
ctttaaactcaggtga

SEQ ID NO: 152 - DNA, 16 bp, synthetic construct
  misc_feature 1..16: note = Synthetic oligonucleotide
  source 1..16: mol_type = other DNA
ttatggagtcattagt

SEQ ID NO: 153 - DNA, 16 bp, synthetic construct
  misc_feature 1..16: note = Synthetic oligonucleotide
  source 1..16: mol_type = other DNA
tgcataacagccattg

SEQ ID NO: 154 - DNA, 16 bp, synthetic construct
  misc_feature 1..16: note = Synthetic oligonucleotide
  source 1..16: mol_type = other DNA
cccaagatataccgag

SEQ ID NO: 155 - DNA, 16 bp, synthetic construct
  misc_feature 1..16: note = Synthetic oligonucleotide
  source 1..16: mol_type = other DNA
gaatcttcccctggca

SEQ ID NO: 156 - DNA, 16 bp, synthetic construct
  misc_feature 1..16: note = Synthetic oligonucleotide
  source 1..16: mol_type = other DNA
caccctcgctccagct

SEQ ID NO: 157 - DNA, 16 bp, synthetic construct
  misc_feature 1..16: note = Synthetic oligonucleotide
  source 1..16: mol_type = other DNA
cagcccagtcaccgag

SEQ ID NO: 158 - DNA, 16 bp, synthetic construct
  misc_feature 1..16: note = Synthetic oligonucleotide
  source 1..16: mol_type = other DNA
tgtactgctggccttt

SEQ ID NO: 159 - DNA, 16 bp, synthetic construct
  misc_feature 1..16: note = Synthetic oligonucleotide
  source 1..16: mol_type = other DNA
cacggagccttcttat

SEQ ID NO: 160 - DNA, 16 bp, synthetic construct
  misc_feature 1..16: note = Synthetic oligonucleotide
  source 1..16: mol_type = other DNA
ggtggtgcctttgtgg

SEQ ID NO: 161 - DNA, 16 bp, synthetic construct
  misc_feature 1..16: note = Synthetic oligonucleotide
  source 1..16: mol_type = other DNA
gccagacccatgccga

SEQ ID NO: 162 - DNA, 16 bp, synthetic construct
  misc_feature 1..16: note = Synthetic oligonucleotide
  source 1..16: mol_type = other DNA
caaagcggctgtgatt

SEQ ID NO: 163 - DNA, 16 bp, synthetic construct
  misc_feature 1..16: note = Synthetic oligonucleotide
  source 1..16: mol_type = other DNA
cttctttccgtagtcc

SEQ ID NO: 164 - DNA, 16 bp, synthetic construct
  misc_feature 1..16: note = Synthetic oligonucleotide
  source 1..16: mol_type = other DNA
gttctcacccaaaaac

SEQ ID NO: 165 - DNA, 16 bp, synthetic construct
  misc_feature 1..16: note = Synthetic oligonucleotide
  source 1..16: mol_type = other DNA
gagggcacggatgtcc

SEQ ID NO: 166 - DNA, 16 bp, synthetic construct
  misc_feature 1..16: note = Synthetic oligonucleotide
  source 1..16: mol_type = other DNA
tgagattggctcagtg

SEQ ID NO: 167 - DNA, 16 bp, synthetic construct
  misc_feature 1..16: note = Synthetic oligonucleotide
  source 1..16: mol_type = other DNA
tgctgggttcattaac

SEQ ID NO: 168 - DNA, 16 bp, synthetic construct
  misc_feature 1..16: note = Synthetic oligonucleotide
  source 1..16: mol_type = other DNA
gtaagtgctttgattc

SEQ ID NO: 169 - DNA, 16 bp, synthetic construct
  misc_feature 1..16: note = Synthetic oligonucleotide
  source 1..16: mol_type = other DNA
cagttcttggtccgcc

SEQ ID NO: 170 - DNA, 16 bp, synthetic construct
  misc_feature 1..16: note = Synthetic oligonucleotide
  source 1..16: mol_type = other DNA
tcaccctctttatccc

SEQ ID NO: 171 - DNA, 16 bp, synthetic construct
  misc_feature 1..16: note = Synthetic oligonucleotide
  source 1..16: mol_type = other DNA
gctgtgctcagctatg

SEQ ID NO: 172 - DNA, 16 bp, synthetic construct
  misc_feature 1..16: note = Synthetic oligonucleotide
  source 1..16: mol_type = other DNA
tctttagtctaaagta

SEQ ID NO: 173 - DNA, 16 bp, synthetic construct
  misc_feature 1..16: note = Synthetic oligonucleotide
  source 1..16: mol_type = other DNA
taactcttgggctttc

SEQ ID NO: 174 - DNA, 16 bp, synthetic construct
  misc_feature 1..16: note = Synthetic oligonucleotide
  source 1..16: mol_type = other DNA
cttcattcttcggagg

SEQ ID NO: 175 - DNA, 16 bp, synthetic construct
  misc_feature 1..16: note = Synthetic oligonucleotide
  source 1..16: mol_type = other DNA
tcatcaggaagccgct

SEQ ID NO: 176 - DNA, 16 bp, synthetic construct
  misc_feature 1..16: note = Synthetic oligonucleotide
  source 1..16: mol_type = other DNA
ggccatggcccaccac

SEQ ID NO: 177 - DNA, 16 bp, synthetic construct
  misc_feature 1..16: note = Synthetic oligonucleotide
  source 1..16: mol_type = other DNA
agcttcctcccaatgc

SEQ ID NO: 178 - DNA, 16 bp, synthetic construct
  misc_feature 1..16: note = Synthetic oligonucleotide
  source 1..16: mol_type = other DNA
aggtcaatcctgggcg

SEQ ID NO: 179 - DNA, 16 bp, synthetic construct
  misc_feature 1..16: note = Synthetic oligonucleotide
  source 1..16: mol_type = other DNA
tctcatgattgcaaag

SEQ ID NO: 180 - DNA, 16 bp, synthetic construct
  misc_feature 1..16: note = Synthetic oligonucleotide
  source 1..16: mol_type = other DNA
gtctcagcagtcaaaa

SEQ ID NO: 181 - DNA, 16 bp, synthetic construct
  misc_feature 1..16: note = Synthetic oligonucleotide
  source 1..16: mol_type = other DNA
ttggttcctagaagaa

SEQ ID NO: 182 - DNA, 16 bp, synthetic construct
  misc_feature 1..16: note = Synthetic oligonucleotide
  source 1..16: mol_type = other DNA
actgagggtatatgaa

SEQ ID NO: 183 - DNA, 16 bp, synthetic construct
  misc_feature 1..16: note = Synthetic oligonucleotide
  source 1..16: mol_type = other DNA
gtgtgataactagctg

SEQ ID NO: 184 - DNA, 16 bp, synthetic construct
  misc_feature 1..16: note = Synthetic oligonucleotide
  source 1..16: mol_type = other DNA
ttttgttgcacccttg

SEQ ID NO: 185 - DNA, 16 bp, synthetic construct
  misc_feature 1..16: note = Synthetic oligonucleotide
  source 1..16: mol_type = other DNA
gtcatttgctaggtgc

SEQ ID NO: 186 - DNA, 16 bp, synthetic construct
  misc_feature 1..16: note = Synthetic oligonucleotide
  source 1..16: mol_type = other DNA
tggtcaacctcctctc

SEQ ID NO: 187 - DNA, 16 bp, synthetic construct
  misc_feature 1..16: note = Synthetic oligonucleotide
  source 1..16: mol_type = other DNA
atacattcccacaggg

SEQ ID NO: 188 - DNA, 16 bp, synthetic construct
  misc_feature 1..16: note = Synthetic oligonucleotide
  source 1..16: mol_type = other DNA
agggaggtaaggagcg

SEQ ID NO: 189 - DNA, 16 bp, synthetic construct
  misc_feature 1..16: note = Synthetic oligonucleotide
  source 1..16: mol_type = other DNA
aggccctattgtgtgg

SEQ ID NO: 190 - DNA, 16 bp, synthetic construct
  misc_feature 1..16: note = Synthetic oligonucleotide
  source 1..16: mol_type = other DNA
attgggcctcagattt

SEQ ID NO: 191 - DNA, 16 bp, synthetic construct
  misc_feature 1..16: note = Synthetic oligonucleotide
  source 1..16: mol_type = other DNA
gcacgaagcctcctcc

SEQ ID NO: 192 - DNA, 16 bp, synthetic construct
  misc_feature 1..16: note = Synthetic oligonucleotide
  source 1..16: mol_type = other DNA
attcacccgataaacc

SEQ ID NO: 193 - DNA, 16 bp, synthetic construct
  misc_feature 1..16: note = Synthetic oligonucleotide
  source 1..16: mol_type = other DNA
aacccaaacaggcagt

SEQ ID NO: 194 - DNA, 16 bp, synthetic construct
  misc_feature 1..16: note = Synthetic oligonucleotide
  source 1..16: mol_type = other DNA
tgtattcggagacctc

SEQ ID NO: 195 - DNA, 16 bp, synthetic construct
  misc_feature 1..16: note = Synthetic oligonucleotide
  source 1..16: mol_type = other DNA
aaacctgggcaaggct

SEQ ID NO: 196 - DNA, 16 bp, synthetic construct
  misc_feature 1..16: note = Synthetic oligonucleotide
  source 1..16: mol_type = other DNA
atgcttactccacacc

SEQ ID NO: 197 - DNA, 16 bp, synthetic construct
  misc_feature 1..16: note = Synthetic oligonucleotide
  source 1..16: mol_type = other DNA
cccatgtttggtacaa

SEQ ID NO: 198 - DNA, 16 bp, synthetic construct
  misc_feature 1..16: note = Synthetic oligonucleotide
  source 1..16: mol_type = other DNA
ccttgtctcactaaac

SEQ ID NO: 199 - DNA, 16 bp, synthetic construct
  misc_feature 1..16: note = Synthetic oligonucleotide
  source 1..16: mol_type = other DNA
ctaagaccagtgagat

SEQ ID NO: 200 - DNA, 16 bp, synthetic construct
  misc_feature 1..16: note = Synthetic oligonucleotide
  source 1..16: mol_type = other DNA
gaaaccacctgtaggg

SEQ ID NO: 201 - DNA, 16 bp, synthetic construct
  misc_feature 1..16: note = Synthetic oligonucleotide
  source 1..16: mol_type = other DNA
gatgggtacttctgtt

SEQ ID NO: 202 - DNA, 16 bp, synthetic construct
  misc_feature 1..16: note = Synthetic oligonucleotide
  source 1..16: mol_type = other DNA
ttagaacagctgtaac

SEQ ID NO: 203 - DNA, 16 bp, synthetic construct
  misc_feature 1..16: note = Synthetic oligonucleotide
  source 1..16: mol_type = other DNA
gggctggtggatataa

SEQ ID NO: 204 - DNA, 16 bp, synthetic construct
  misc_feature 1..16: note = Synthetic oligonucleotide
  source 1..16: mol_type = other DNA
cgagcgattgtcttgt

SEQ ID NO: 205 - DNA, 16 bp, synthetic construct
  misc_feature 1..16: note = Synthetic oligonucleotide
  source 1..16: mol_type = other DNA
gttgccgtggcaactc

SEQ ID NO: 206 - DNA, 16 bp, synthetic construct
  misc_feature 1..16: note = Synthetic oligonucleotide
  source 1..16: mol_type = other DNA
gagtttttcctcagtc

SEQ ID NO: 207 - DNA, 16 bp, synthetic construct
  misc_feature 1..16: note = Synthetic oligonucleotide
  source 1..16: mol_type = other DNA
gaggcacctccatgtt

SEQ ID NO: 208 - DNA, 16 bp, synthetic construct
  misc_feature 1..16: note = Synthetic oligonucleotide
  source 1..16: mol_type = other DNA
caaaggagattcctcc

SEQ ID NO: 209 - DNA, 16 bp, synthetic construct
  misc_feature 1..16: note = Synthetic oligonucleotide
  source 1..16: mol_type = other DNA
ctcccttatagcttac

SEQ ID NO: 210 - DNA, 16 bp, synthetic construct
  misc_feature 1..16: note = Synthetic oligonucleotide
  source 1..16: mol_type = other DNA
cgagagtcaccgccca

SEQ ID NO: 211 - DNA, 16 bp, synthetic construct
  misc_feature 1..16: note = Synthetic oligonucleotide
  source 1..16: mol_type = other DNA
ttcttgccgtgcacac

SEQ ID NO: 212 - DNA, 16 bp, synthetic construct
  misc_feature 1..16: note = Synthetic oligonucleotide
  source 1..16: mol_type = other DNA
cgtgtggtttgcaggg

SEQ ID NO: 213 - DNA, 16 bp, synthetic construct
  misc_feature 1..16: note = Synthetic oligonucleotide
  source 1..16: mol_type = other DNA
taggtctacaaagaac

SEQ ID NO: 214 - DNA, 16 bp, synthetic construct
  misc_feature 1..16: note = Synthetic oligonucleotide
  source 1..16: mol_type = other DNA
tggactgctccctgta

SEQ ID NO: 215 - DNA, 16 bp, synthetic construct
  misc_feature 1..16: note = Synthetic oligonucleotide
  source 1..16: mol_type = other DNA
agatgtgtttaggcat

SEQ ID NO: 216 - DNA, 16 bp, synthetic construct
  misc_feature 1..16: note = Synthetic oligonucleotide
  source 1..16: mol_type = other DNA
catcattgggttatga

SEQ ID NO: 217 - DNA, 16 bp, synthetic construct
  misc_feature 1..16: note = Synthetic oligonucleotide
  source 1..16: mol_type = other DNA
cacatgcctgttgggt

SEQ ID NO: 218 - DNA, 16 bp, synthetic construct
  misc_feature 1..16: note = Synthetic oligonucleotide
  source 1..16: mol_type = other DNA
ttttcagctcagcacc

SEQ ID NO: 219 - DNA, 16 bp, synthetic construct
  misc_feature 1..16: note = Synthetic oligonucleotide
  source 1..16: mol_type = other DNA
agactccaaccctttt

SEQ ID NO: 220 - DNA, 16 bp, synthetic construct
  misc_feature 1..16: note = Synthetic oligonucleotide
  source 1..16: mol_type = other DNA
taattctattagaggg

SEQ ID NO: 221 - DNA, 16 bp, synthetic construct
  misc_feature 1..16: note = Synthetic oligonucleotide
  source 1..16: mol_type = other DNA
tgaagctttaaactca

SEQ ID NO: 222 - DNA, 16 bp, synthetic construct
  misc_feature 1..16: note = Synthetic oligonucleotide
  source 1..16: mol_type = other DNA
gacttgttttatggag

SEQ ID NO: 223 - DNA, 16 bp, synthetic construct
  misc_feature 1..16: note = Synthetic oligonucleotide
  source 1..16: mol_type = other DNA
ggagtgcataacagcc

SEQ ID NO: 224 - DNA, 16 bp, synthetic construct
  misc_feature 1..16: note = Synthetic oligonucleotide
  source 1..16: mol_type = other DNA
ccccaagatataccga

SEQ ID NO: 225 - DNA, 16 bp, synthetic construct
  misc_feature 1..16: note = Synthetic oligonucleotide
  source 1..16: mol_type = other DNA
ggaatcttcccctggc

SEQ ID NO: 226 - DNA, 16 bp, synthetic construct
  misc_feature 1..16: note = Synthetic oligonucleotide
  source 1..16: mol_type = other DNA
gcaccctcgctccagc

SEQ ID NO: 227 - DNA, 16 bp, synthetic construct
  misc_feature 1..16: note = Synthetic oligonucleotide
  source 1..16: mol_type = other DNA
gcagcccagtcaccga

SEQ ID NO: 228 - DNA, 16 bp, synthetic construct
  misc_feature 1..16: note = Synthetic oligonucleotide
  source 1..16: mol_type = other DNA
ctgtactgctggcctt

SEQ ID NO: 229 - DNA, 16 bp, synthetic construct
  misc_feature 1..16: note = Synthetic oligonucleotide
  source 1..16: mol_type = other DNA
gcacggagccttctta

SEQ ID NO: 230 - DNA, 16 bp, synthetic construct
  misc_feature 1..16: note = Synthetic oligonucleotide
  source 1..16: mol_type = other DNA
tggtggtgcctttgtg

SEQ ID NO: 231 - DNA, 16 bp, synthetic construct
  misc_feature 1..16: note = Synthetic oligonucleotide
  source 1..16: mol_type = other DNA
tgccagacccatgccg

SEQ ID NO: 232 - DNA, 16 bp, synthetic construct
  misc_feature 1..16: note = Synthetic oligonucleotide
  source 1..16: mol_type = other DNA
cggtcaaagcggctgt

SEQ ID NO: 233 - DNA, 16 bp, synthetic construct
  misc_feature 1..16: note = Synthetic oligonucleotide
  source 1..16: mol_type = other DNA
acttctttccgtagtc

SEQ ID NO: 234 - DNA, 16 bp, synthetic construct
  misc_feature 1..16: note = Synthetic oligonucleotide
  source 1..16: mol_type = other DNA
atatgttctcacccaa

SEQ ID NO: 235 - DNA, 16 bp, synthetic construct
  misc_feature 1..16: note = Synthetic oligonucleotide
  source 1..16: mol_type = other DNA
tgagggcacggatgtc

SEQ ID NO: 236 - DNA, 16 bp, synthetic construct
  misc_feature 1..16: note = Synthetic oligonucleotide
  source 1..16: mol_type = other DNA
cagctgagattggctc

SEQ ID NO: 237 - DNA, 16 bp, synthetic construct
  misc_feature 1..16: note = Synthetic oligonucleotide
  source 1..16: mol_type = other DNA
atgctgggttcattaa

SEQ ID NO: 238 - DNA, 16 bp, synthetic construct
  misc_feature 1..16: note = Synthetic oligonucleotide
  source 1..16: mol_type = other DNA
atgtaagtgctttgat

SEQ ID NO: 239 - DNA, 16 bp, synthetic construct
  misc_feature 1..16: note = Synthetic oligonucleotide
  source 1..16: mol_type = other DNA
acagttcttggtccgc

SEQ ID NO: 240 - DNA, 16 bp, synthetic construct
  misc_feature 1..16: note = Synthetic oligonucleotide
  source 1..16: mol_type = other DNA
ctcaccctctttatcc

SEQ ID NO: 241 - DNA, 16 bp, synthetic construct
  misc_feature 1..16: note = Synthetic oligonucleotide
  source 1..16: mol_type = other DNA
ctgccatctgcattaa

SEQ ID NO: 242 - DNA, 16 bp, synthetic construct
  misc_feature 1..16: note = Synthetic oligonucleotide
  source 1..16: mol_type = other DNA
ccccccaatatattct

SEQ ID NO: 243 - DNA, 16 bp, synthetic construct
  misc_feature 1..16: note = Synthetic oligonucleotide
  source 1..16: mol_type = other DNA
gttctaactcttgggc

SEQ ID NO: 244 - DNA, 16 bp, synthetic construct
  misc_feature 1..16: note = Synthetic oligonucleotide
  source 1..16: mol_type = other DNA
acttcattcttcggag

SEQ ID NO: 245 - DNA, 16 bp, synthetic construct
  misc_feature 1..16: note = Synthetic oligonucleotide
  source 1..16: mol_type = other DNA
atcatcaggaagccgc

SEQ ID NO: 246 - DNA, 16 bp, synthetic construct
  misc_feature 1..16: note = Synthetic oligonucleotide
  source 1..16: mol_type = other DNA
tggccatggcccacca

SEQ ID NO: 247 - DNA, 16 bp, synthetic construct
  misc_feature 1..16: note = Synthetic oligonucleotide
  source 1..16: mol_type = other DNA
gagcttcctcccaatg

SEQ ID NO: 248 - DNA, 16 bp, synthetic construct
  misc_feature 1..16: note = Synthetic oligonucleotide
  source 1..16: mol_type = other DNA
atgagtaggtgagttt

SEQ ID NO: 249 - DNA, 16 bp, synthetic construct
  misc_feature 1..16: note = Synthetic oligonucleotide
  source 1..16: mol_type = other DNA
aatctcatgattgcaa

SEQ ID NO: 250 - DNA, 16 bp, synthetic construct
  misc_feature 1..16: note = Synthetic oligonucleotide
  source 1..16: mol_type = other DNA
tgtctcagcagtcaaa

SEQ ID NO: 251 - DNA, 16 bp, synthetic construct
  misc_feature 1..16: note = Synthetic oligonucleotide
  source 1..16: mol_type = other DNA
tttggttcctagaaga

SEQ ID NO: 252 - DNA, 16 bp, synthetic construct
  misc_feature 1..16: note = Synthetic oligonucleotide
  source 1..16: mol_type = other DNA
acaactgagggtatat

SEQ ID NO: 253 - DNA, 16 bp, synthetic construct
  misc_feature 1..16: note = Synthetic oligonucleotide
  source 1..16: mol_type = other DNA
agcatgtgtgataact

SEQ ID NO: 254 - DNA, 16 bp, synthetic construct
  misc_feature 1..16: note = Synthetic oligonucleotide
  source 1..16: mol_type = other DNA
tacctgggtccatggt

SEQ ID NO: 255 - DNA, 16 bp, synthetic construct
  misc_feature 1..16: note = Synthetic oligonucleotide
  source 1..16: mol_type = other DNA
gagtcatttgctaggt

SEQ ID NO: 256 - DNA, 16 bp, synthetic construct
  misc_feature 1..16: note = Synthetic oligonucleotide
  source 1..16: mol_type = other DNA
gctggtcaacctcctc

SEQ ID NO: 257 - DNA, 16 bp, synthetic construct
  misc_feature 1..16: note = Synthetic oligonucleotide
  source 1..16: mol_type = other DNA
gatacattcccacagg

SEQ ID NO: 258 - DNA, 16 bp, synthetic construct
  misc_feature 1..16: note = Synthetic oligonucleotide
  source 1..16: mol_type = other DNA
aagggaggtaaggagc

SEQ ID NO: 259 - DNA, 16 bp, synthetic construct
  misc_feature 1..16: note = Synthetic oligonucleotide
  source 1..16: mol_type = other DNA
gaggccctattgtgtg

SEQ ID NO: 260 - DNA, 16 bp, synthetic construct
  misc_feature 1..16: note = Synthetic oligonucleotide
  source 1..16: mol_type = other DNA
tattgggcctcagatt

SEQ ID NO: 261 - DNA, 16 bp, synthetic construct
  misc_feature 1..16: note = Synthetic oligonucleotide
  source 1..16: mol_type = other DNA
agcacgaagcctcctc

SEQ ID NO: 262 - DNA, 16 bp, synthetic construct
  misc_feature 1..16: note = Synthetic oligonucleotide
  source 1..16: mol_type = other DNA
tcatattcacccgata

SEQ ID NO: 263 - DNA, 16 bp, synthetic construct
  misc_feature 1..16: note = Synthetic oligonucleotide
  source 1..16: mol_type = other DNA
taaacccaaacaggca

SEQ ID NO: 264 - DNA, 16 bp, synthetic construct
  misc_feature 1..16: note = Synthetic oligonucleotide
  source 1..16: mol_type = other DNA
ctgtattcggagacct

SEQ ID NO: 265 - DNA, 16 bp, synthetic construct
  misc_feature 1..16: note = Synthetic oligonucleotide
  source 1..16: mol_type = other DNA
caaaaacctgggcaag

SEQ ID NO: 266 - DNA, 16 bp, synthetic construct
  misc_feature 1..16: note = Synthetic oligonucleotide
  source 1..16: mol_type = other DNA
tatgcttactccacac

SEQ ID NO: 267 - DNA, 16 bp, synthetic construct
  misc_feature 1..16: note = Synthetic oligonucleotide
  source 1..16: mol_type = other DNA
tgcccatgtttggtac

SEQ ID NO: 268 - DNA, 16 bp, synthetic construct
  misc_feature 1..16: note = Synthetic oligonucleotide
  source 1..16: mol_type = other DNA
ctccttgtctcactaa

SEQ ID NO: 269 - DNA, 16 bp, synthetic construct
  misc_feature 1..16: note = Synthetic oligonucleotide
  source 1..16: mol_type = other DNA
gctaagaccagtgaga

SEQ ID NO: 270 - DNA, 16 bp, synthetic construct
  misc_feature 1..16: note = Synthetic oligonucleotide
  source 1..16: mol_type = other DNA
tgaaaccacctgtagg

SEQ ID NO: 271 - DNA, 16 bp, synthetic construct
  misc_feature 1..16: note = Synthetic oligonucleotide
  source 1..16: mol_type = other DNA
agatgggtacttctgt

SEQ ID NO: 272 - DNA, 16 bp, synthetic construct
  misc_feature 1..16: note = Synthetic oligonucleotide
  source 1..16: mol_type = other DNA
ctttagaacagctgta

SEQ ID NO: 273 - DNA, 16 bp, synthetic construct
  misc_feature 1..16: note = Synthetic oligonucleotide
  source 1..16: mol_type = other DNA
ttcttgatgtggtggg

SEQ ID NO: 274 - DNA, 16 bp, synthetic construct
  misc_feature 1..16: note = Synthetic oligonucleotide
  source 1..16: mol_type = other DNA
gcgagcgattgtcttg

SEQ ID NO: 275 - DNA, 16 bp, synthetic construct
  misc_feature 1..16: note = Synthetic oligonucleotide
  source 1..16: mol_type = other DNA
ggttgccgtggcaact

SEQ ID NO: 276 - DNA, 16 bp, synthetic construct
  misc_feature 1..16: note = Synthetic oligonucleotide
  source 1..16: mol_type = other DNA
gggagagtttttcctc

SEQ ID NO: 277 - DNA, 16 bp, synthetic construct
  misc_feature 1..16: note = Synthetic oligonucleotide
  source 1..16: mol_type = other DNA
tgaggcacctccatgt

SEQ ID NO: 278 - DNA, 16 bp, synthetic construct
  misc_feature 1..16: note = Synthetic oligonucleotide
  source 1..16: mol_type = other DNA
gcaaaggagattcctc

SEQ ID NO: 279 - DNA, 16 bp, synthetic construct
  misc_feature 1..16: note = Synthetic oligonucleotide
  source 1..16: mol_type = other DNA
tctcccttatagctta

SEQ ID NO: 280 - DNA, 16 bp, synthetic construct
  misc_feature 1..16: note = Synthetic oligonucleotide
  source 1..16: mol_type = other DNA
gcgagagtcaccgccc

SEQ ID NO: 281 - DNA, 16 bp, synthetic construct
  misc_feature 1..16: note = Synthetic oligonucleotide
  source 1..16: mol_type = other DNA
tttcttgccgtgcaca

SEQ ID NO: 282 - DNA, 16 bp, synthetic construct
  misc_feature 1..16: note = Synthetic oligonucleotide
  source 1..16: mol_type = other DNA
agctgccaccaaaacg

SEQ ID NO: 283 - DNA, 16 bp, synthetic construct
  misc_feature 1..16: note = Synthetic oligonucleotide
  source 1..16: mol_type = other DNA
gtaggtctacaaagaa

SEQ ID NO: 284 - DNA, 16 bp, synthetic construct
  misc_feature 1..16: note = Synthetic oligonucleotide
  source 1..16: mol_type = other DNA
ctggactgctccctgt

SEQ ID NO: 285 - DNA, 16 bp, synthetic construct
  misc_feature 1..16: note = Synthetic oligonucleotide
  source 1..16: mol_type = other DNA
cagatgtgtttaggca

SEQ ID NO: 286 - DNA, 16 bp, synthetic construct
  misc_feature 1..16: note = Synthetic oligonucleotide
  source 1..16: mol_type = other DNA
acatcattgggttatg

SEQ ID NO: 287 - DNA, 16 bp, synthetic construct
  misc_feature 1..16: note = Synthetic oligonucleotide
  source 1..16: mol_type = other DNA
ccacatgcctgttggg

SEQ ID NO: 288 - DNA, 16 bp, synthetic construct
  misc_feature 1..16: note = Synthetic oligonucleotide
  source 1..16: mol_type = other DNA
gaatccttttcagctc

SEQ ID NO: 289 - DNA, 16 bp, synthetic construct
  misc_feature 1..16: note = Synthetic oligonucleotide
  source 1..16: mol_type = other DNA
cagactccaacccttt

SEQ ID NO: 290 - DNA, 16 bp, synthetic construct
  misc_feature 1..16: note = Synthetic oligonucleotide
  source 1..16: mol_type = other DNA
ctaattctattagagg

SEQ ID NO: 291 - DNA, 16 bp, synthetic construct
  misc_feature 1..16: note = Synthetic oligonucleotide
  source 1..16: mol_type = other DNA
gctgaagctttaaact

SEQ ID NO: 292 - DNA, 16 bp, synthetic construct
  misc_feature 1..16: note = Synthetic oligonucleotide
  source 1..16: mol_type = other DNA
gtgggacttgttttat

SEQ ID NO: 293 - DNA, 16 bp, synthetic construct
  misc_feature 1..16: note = Synthetic oligonucleotide
  source 1..16: mol_type = other DNA
gggagtgcataacagc

SEQ ID NO: 294 - DNA, 16 bp, synthetic construct
  misc_feature 1..16: note = Synthetic oligonucleotide
  source 1..16: mol_type = other DNA
tccccaagatataccg

SEQ ID NO: 295 - DNA, 16 bp, synthetic construct
  misc_feature 1..16: note = Synthetic oligonucleotide
  source 1..16: mol_type = other DNA
aggaatcttcccctgg

SEQ ID NO: 296 - DNA, 16 bp, synthetic construct
  misc_feature 1..16: note = Synthetic oligonucleotide
  source 1..16: mol_type = other DNA
tgcaccctcgctccag

SEQ ID NO: 297 - DNA, 16 bp, synthetic construct
  misc_feature 1..16: note = Synthetic oligonucleotide
  source 1..16: mol_type = other DNA
agcagcccagtcaccg

SEQ ID NO: 298 - DNA, 16 bp, synthetic construct
  misc_feature 1..16: note = Synthetic oligonucleotide
  source 1..16: mol_type = other DNA
tctgtactgctggcct

SEQ ID NO: 299 - DNA, 16 bp, synthetic construct
  misc_feature 1..16: note = Synthetic oligonucleotide
  source 1..16: mol_type = other DNA
ggcacggagccttctt

SEQ ID NO: 300 - DNA, 16 bp, synthetic construct
  misc_feature 1..16: note = Synthetic oligonucleotide
  source 1..16: mol_type = other DNA
atggtggtgcctttgt

SEQ ID NO: 301 - DNA, 16 bp, synthetic construct
  misc_feature 1..16: note = Synthetic oligonucleotide
  source 1..16: mol_type = other DNA
gtgccagacccatgcc

SEQ ID NO: 302 - DNA, 16 bp, synthetic construct
  misc_feature 1..16: note = Synthetic oligonucleotide
  source 1..16: mol_type = other DNA
ccggtcaaagcggctg

SEQ ID NO: 303 - DNA, 16 bp, synthetic construct
  misc_feature 1..16: note = Synthetic oligonucleotide
  source 1..16: mol_type = other DNA
cacttctttccgtagt

SEQ ID NO: 304 - DNA, 16 bp, synthetic construct
  misc_feature 1..16: note = Synthetic oligonucleotide
  source 1..16: mol_type = other DNA
gatatgttctcaccca

SEQ ID NO: 305 - DNA, 16 bp, synthetic construct
  misc_feature 1..16: note = Synthetic oligonucleotide
  source 1..16: mol_type = other DNA
ctgagggcacggatgt

SEQ ID NO: 306 - DNA, 16 bp, synthetic construct
  misc_feature 1..16: note = Synthetic oligonucleotide
  source 1..16: mol_type = other DNA
tcagctgagattggct

SEQ ID NO: 307 - DNA, 16 bp, synthetic construct
  misc_feature 1..16: note = Synthetic oligonucleotide
  source 1..16: mol_type = other DNA
gatgctgggttcatta

SEQ ID NO: 308 - DNA, 16 bp, synthetic construct
  misc_feature 1..16: note = Synthetic oligonucleotide
  source 1..16: mol_type = other DNA
tcatgtaagtgctttg

SEQ ID NO: 309 - DNA, 16 bp, synthetic construct
  misc_feature 1..16: note = Synthetic oligonucleotide
  source 1..16: mol_type = other DNA
cacagttcttggtccg

SEQ ID NO: 310 - DNA, 16 bp, synthetic construct
  misc_feature 1..16: note = Synthetic oligonucleotide
  source 1..16: mol_type = other DNA
tacctcaccctcttta

SEQ ID NO: 311 - DNA, 16 bp, synthetic construct
  misc_feature 1..16: note = Synthetic oligonucleotide
  source 1..16: mol_type = other DNA
actgccatctgcatta

SEQ ID NO: 312 - DNA, 16 bp, synthetic construct
  misc_feature 1..16: note = Synthetic oligonucleotide
  source 1..16: mol_type = other DNA
gccccccaatatattc

SEQ ID NO: 313 - DNA, 16 bp, synthetic construct
  misc_feature 1..16: note = Synthetic oligonucleotide
  source 1..16: mol_type = other DNA
tgttctaactcttggg

SEQ ID NO: 314 - DNA, 16 bp, synthetic construct
  misc_feature 1..16: note = Synthetic oligonucleotide
  source 1..16: mol_type = other DNA
gacttcattcttcgga

SEQ ID NO: 315 - DNA, 16 bp, synthetic construct
  misc_feature 1..16: note = Synthetic oligonucleotide
  source 1..16: mol_type = other DNA
catcatcaggaagccg

SEQ ID NO: 316 - DNA, 16 bp, synthetic construct
  misc_feature 1..16: note = Synthetic oligonucleotide
  source 1..16: mol_type = other DNA
atggccatggcccacc

SEQ ID NO: 317 - DNA, 16 bp, synthetic construct
  misc_feature 1..16: note = Synthetic oligonucleotide
  source 1..16: mol_type = other DNA
tgagcttcctcccaat

SEQ ID NO: 318 - DNA, 16 bp, synthetic construct
  misc_feature 1..16: note = Synthetic oligonucleotide
  source 1..16: mol_type = other DNA
gatgagtaggtgagtt

SEQ ID NO: 319 - DNA, 16 bp, synthetic construct
  misc_feature 1..16: note = Synthetic oligonucleotide
  source 1..16: mol_type = other DNA
gaatctcatgattgca

SEQ ID NO: 320 - DNA, 16 bp, synthetic construct
  misc_feature 1..16: note = Synthetic oligonucleotide
  source 1..16: mol_type = other DNA
agatgggcacccccaa

SEQ ID NO: 321 - DNA, 16 bp, synthetic construct
  misc_feature 1..16: note = Synthetic oligonucleotide
  source 1..16: mol_type = other DNA
ttccgggaagtgactt

SEQ ID NO: 322 - DNA, 16 bp, synthetic construct
  misc_feature 1..16: note = Synthetic oligonucleotide
  source 1..16: mol_type = other DNA
aacaccaattagtaca

SEQ ID NO: 323 - DNA, 16 bp, synthetic construct
  misc_feature 1..16: note = Synthetic oligonucleotide
  source 1..16: mol_type = other DNA
caatgaccagggcctg

SEQ ID NO: 324 - DNA, 16 bp, synthetic construct
  misc_feature 1..16: note = Synthetic oligonucleotide
  source 1..16: mol_type = other DNA
agcctacctgggtcca

SEQ ID NO: 325 - DNA, 16 bp, synthetic construct
  misc_feature 1..16: note = Synthetic oligonucleotide
  source 1..16: mol_type = other DNA
tgagtcatttgctagg

SEQ ID NO: 326 - DNA, 16 bp, synthetic construct
  misc_feature 1..16: note = Synthetic oligonucleotide
  source 1..16: mol_type = other DNA
gaggtgacaggtcggg

SEQ ID NO: 327 - DNA, 16 bp, synthetic construct
  misc_feature 1..16: note = Synthetic oligonucleotide
  source 1..16: mol_type = other DNA
cgatacattcccacag

SEQ ID NO: 328 - DNA, 16 bp, synthetic construct
  misc_feature 1..16: note = Synthetic oligonucleotide
  source 1..16: mol_type = other DNA
atggtacaggagaagg

SEQ ID NO: 329 - DNA, 16 bp, synthetic construct
  misc_feature 1..16: note = Synthetic oligonucleotide
  source 1..16: mol_type = other DNA
ggaggccctattgtgt

SEQ ID NO: 330 - DNA, 16 bp, synthetic construct
  misc_feature 1..16: note = Synthetic oligonucleotide
  source 1..16: mol_type = other DNA
ctattgggcctcagat

SEQ ID NO: 331 - DNA, 16 bp, synthetic construct
  misc_feature 1..16: note = Synthetic oligonucleotide
  source 1..16: mol_type = other DNA
atagcacgaagcctcc

SEQ ID NO: 332 - DNA, 16 bp, synthetic construct
  misc_feature 1..16: note = Synthetic oligonucleotide
  source 1..16: mol_type = other DNA
ttcatattcacccgat

SEQ ID NO: 333 - DNA, 16 bp, synthetic construct
  misc_feature 1..16: note = Synthetic oligonucleotide
  source 1..16: mol_type = other DNA
gtaaacccaaacaggc

SEQ ID NO: 334 - DNA, 16 bp, synthetic construct
  misc_feature 1..16: note = Synthetic oligonucleotide
  source 1..16: mol_type = other DNA
cctgtattcggagacc

SEQ ID NO: 335 - DNA, 16 bp, synthetic construct
  misc_feature 1..16: note = Synthetic oligonucleotide
  source 1..16: mol_type = other DNA
atcaaaaacctgggca

SEQ ID NO: 336 - DNA, 16 bp, synthetic construct
  misc_feature 1..16: note = Synthetic oligonucleotide
  source 1..16: mol_type = other DNA
ttatgcttactccaca

SEQ ID NO: 337 - DNA, 16 bp, synthetic construct
  misc_feature 1..16: note = Synthetic oligonucleotide
  source 1..16: mol_type = other DNA
atgcccatgtttggta

SEQ ID NO: 338 - DNA, 16 bp, synthetic construct
  misc_feature 1..16: note = Synthetic oligonucleotide
  source 1..16: mol_type = other DNA
cctccttgtctcacta

SEQ ID NO: 339 - DNA, 16 bp, synthetic construct
  misc_feature 1..16: note = Synthetic oligonucleotide
  source 1..16: mol_type = other DNA
agctaagaccagtgag

SEQ ID NO: 340 - DNA, 16 bp, synthetic construct
  misc_feature 1..16: note = Synthetic oligonucleotide
  source 1..16: mol_type = other DNA
ctgaaaccacctgtag

SEQ ID NO: 341 - DNA, 16 bp, synthetic construct
  misc_feature 1..16: note = Synthetic oligonucleotide
  source 1..16: mol_type = other DNA
cagatgggtacttctg

SEQ ID NO: 342 - DNA, 16 bp, synthetic construct
  misc_feature 1..16: note = Synthetic oligonucleotide
  source 1..16: mol_type = other DNA
gcctttagaacagctg

SEQ ID NO: 343 - DNA, 16 bp, synthetic construct
  misc_feature 1..16: note = Synthetic oligonucleotide
  source 1..16: mol_type = other DNA
atttcttgatgtggtg

SEQ ID NO: 344 - DNA, 16 bp, synthetic construct
  misc_feature 1..16: note = Synthetic oligonucleotide
  source 1..16: mol_type = other DNA
ggcgagcgattgtctt

SEQ ID NO: 345 - DNA, 16 bp, synthetic construct
  misc_feature 1..16: note = Synthetic oligonucleotide
  source 1..16: mol_type = other DNA
tggttgccgtggcaac

SEQ ID NO: 346 - DNA, 16 bp, synthetic construct
  misc_feature 1..16: note = Synthetic oligonucleotide
  source 1..16: mol_type = other DNA
atcatcttgttttggg

SEQ ID NO: 347 - DNA, 16 bp, synthetic construct
  misc_feature 1..16: note = Synthetic oligonucleotide
  source 1..16: mol_type = other DNA
ttgaggcacctccatg

SEQ ID NO: 348 - DNA, 16 bp, synthetic construct
  misc_feature 1..16: note = Synthetic oligonucleotide
  source 1..16: mol_type = other DNA
atgcaaaggagattcc

SEQ ID NO: 349 - DNA, 16 bp, synthetic construct
  misc_feature 1..16: note = Synthetic oligonucleotide
  source 1..16: mol_type = other DNA
ttctcccttatagctt

SEQ ID NO: 350 - DNA, 16 bp, synthetic construct
  misc_feature 1..16: note = Synthetic oligonucleotide
  source 1..16: mol_type = other DNA
agcgagagtcaccgcc

SEQ ID NO: 351 - DNA, 16 bp, synthetic construct
  misc_feature 1..16: note = Synthetic oligonucleotide
  source 1..16: mol_type = other DNA
gtttcttgccgtgcac

SEQ ID NO: 352 - DNA, 16 bp, synthetic construct
  misc_feature 1..16: note = Synthetic oligonucleotide
  source 1..16: mol_type = other DNA
gtcagctgccaccaaa

SEQ ID NO: 353 - DNA, 16 bp, synthetic construct
  misc_feature 1..16: note = Synthetic oligonucleotide
  source 1..16: mol_type = other DNA
ggtaggtctacaaaga

SEQ ID NO: 354 - DNA, 16 bp, synthetic construct
  misc_feature 1..16: note = Synthetic oligonucleotide
  source 1..16: mol_type = other DNA
gaggctggactgctcc

SEQ ID NO: 355 - DNA, 16 bp, synthetic construct
  misc_feature 1..16: note = Synthetic oligonucleotide
  source 1..16: mol_type = other DNA
ccagatgtgtttaggc

SEQ ID NO: 356 - DNA, 16 bp, synthetic construct
  misc_feature 1..16: note = Synthetic oligonucleotide
  source 1..16: mol_type = other DNA
cacatcattgggttat

SEQ ID NO: 357 - DNA, 16 bp, synthetic construct
  misc_feature 1..16: note = Synthetic oligonucleotide
  source 1..16: mol_type = other DNA
gccacatgcctgttgg

SEQ ID NO: 358 - DNA, 16 bp, synthetic construct
  misc_feature 1..16: note = Synthetic oligonucleotide
  source 1..16: mol_type = other DNA
gagaggaatgaatcct

SEQ ID NO: 359 - DNA, 16 bp, synthetic construct
  misc_feature 1..16: note = Synthetic oligonucleotide
  source 1..16: mol_type = other DNA
gagtcctccccagact

SEQ ID NO: 360 - DNA, 16 bp, synthetic construct
  misc_feature 1..16: note = Synthetic oligonucleotide
  source 1..16: mol_type = other DNA
gctctaattctattag

SEQ ID NO: 361 - DNA, 16 bp, synthetic construct
  misc_feature 1..16: note = Synthetic oligonucleotide
  source 1..16: mol_type = other DNA
tgctgaagctttaaac

SEQ ID NO: 362 - DNA, 16 bp, synthetic construct
  misc_feature 1..16: note = Synthetic oligonucleotide
  source 1..16: mol_type = other DNA
tgtgggacttgtttta

SEQ ID NO: 363 - DNA, 16 bp, synthetic construct
  misc_feature 1..16: note = Synthetic oligonucleotide
  source 1..16: mol_type = other DNA
gtgggagtgcataaca

SEQ ID NO: 364 - DNA, 16 bp, synthetic construct
  misc_feature 1..16: note = Synthetic oligonucleotide
  source 1..16: mol_type = other DNA
gtccccaagatatacc

SEQ ID NO: 365 - DNA, 16 bp, synthetic construct
  misc_feature 1..16: note = Synthetic oligonucleotide
  source 1..16: mol_type = other DNA
ccaaggaatcttcccc

SEQ ID NO: 366 - DNA, 16 bp, synthetic construct
  misc_feature 1..16: note = Synthetic oligonucleotide
  source 1..16: mol_type = other DNA
ttgcaccctcgctcca

SEQ ID NO: 367 - DNA, 16 bp, synthetic construct
  misc_feature 1..16: note = Synthetic oligonucleotide
  source 1..16: mol_type = other DNA
gtgccagcagcccagt

SEQ ID NO: 368 - DNA, 16 bp, synthetic construct
  misc_feature 1..16: note = Synthetic oligonucleotide
  source 1..16: mol_type = other DNA
ttctgtactgctggcc

SEQ ID NO: 369 - DNA, 16 bp, synthetic construct
  misc_feature 1..16: note = Synthetic oligonucleotide
  source 1..16: mol_type = other DNA
gggcacggagccttct

SEQ ID NO: 370 - DNA, 16 bp, synthetic construct
  misc_feature 1..16: note = Synthetic oligonucleotide
  source 1..16: mol_type = other DNA
gatggtggtgcctttg

SEQ ID NO: 371 - DNA, 16 bp, synthetic construct
  misc_feature 1..16: note = Synthetic oligonucleotide
  source 1..16: mol_type = other DNA
ggtgccagacccatgc

SEQ ID NO: 372 - DNA, 16 bp, synthetic construct
  misc_feature 1..16: note = Synthetic oligonucleotide
  source 1..16: mol_type = other DNA
cccggtcaaagcggct

SEQ ID NO: 373 - DNA, 16 bp, synthetic construct
  misc_feature 1..16: note = Synthetic oligonucleotide
  source 1..16: mol_type = other DNA
ccacttctttccgtag

SEQ ID NO: 374 - DNA, 16 bp, synthetic construct
  misc_feature 1..16: note = Synthetic oligonucleotide
  source 1..16: mol_type = other DNA
agttggatatgttctc

SEQ ID NO: 375 - DNA, 16 bp, synthetic construct
  misc_feature 1..16: note = Synthetic oligonucleotide
  source 1..16: mol_type = other DNA
tctgagggcacggatg

SEQ ID NO: 376 - DNA, 16 bp, synthetic construct
  misc_feature 1..16: note = Synthetic oligonucleotide
  source 1..16: mol_type = other DNA
ttcagctgagattggc

SEQ ID NO: 377 - DNA, 16 bp, synthetic construct
  misc_feature 1..16: note = Synthetic oligonucleotide
  source 1..16: mol_type = other DNA
ggatgctgggttcatt

SEQ ID NO: 378 - DNA, 16 bp, synthetic construct
  misc_feature 1..16: note = Synthetic oligonucleotide
  source 1..16: mol_type = other DNA
ctcatgtaagtgcttt

SEQ ID NO: 379 - DNA, 16 bp, synthetic construct
  misc_feature 1..16: note = Synthetic oligonucleotide
  source 1..16: mol_type = other DNA
gtcacagttcttggtc

SEQ ID NO: 380 - DNA, 16 bp, synthetic construct
  misc_feature 1..16: note = Synthetic oligonucleotide
  source 1..16: mol_type = other DNA
ttacctcaccctcttt

SEQ ID NO: 381 - DNA, 16 bp, synthetic construct
  misc_feature 1..16: note = Synthetic oligonucleotide
  source 1..16: mol_type = other DNA
cactgccatctgcatt

SEQ ID NO: 382 - DNA, 16 bp, synthetic construct
  misc_feature 1..16: note = Synthetic oligonucleotide
  source 1..16: mol_type = other DNA
ggccccccaatatatt

SEQ ID NO: 383 - DNA, 16 bp, synthetic construct
  misc_feature 1..16: note = Synthetic oligonucleotide
  source 1..16: mol_type = other DNA
ctgttctaactcttgg

SEQ ID NO: 384 - DNA, 16 bp, synthetic construct
  misc_feature 1..16: note = Synthetic oligonucleotide
  source 1..16: mol_type = other DNA
agacttcattcttcgg

SEQ ID NO: 385 - DNA, 16 bp, synthetic construct
  misc_feature 1..16: note = Synthetic oligonucleotide
  source 1..16: mol_type = other DNA
ccatcatcaggaagcc

SEQ ID NO: 386 - DNA, 16 bp, synthetic construct
  misc_feature 1..16: note = Synthetic oligonucleotide
  source 1..16: mol_type = other DNA
ggaccatggccatggc

SEQ ID NO: 387 - DNA, 16 bp, synthetic construct
  misc_feature 1..16: note = Synthetic oligonucleotide
  source 1..16: mol_type = other DNA
gatctgagcttcctcc

SEQ ID NO: 388 - DNA, 16 bp, synthetic construct
  misc_feature 1..16: note = Synthetic oligonucleotide
  source 1..16: mol_type = other DNA
tgatgagtaggtgagt

SEQ ID NO: 389 - DNA, 16 bp, synthetic construct
  misc_feature 1..16: note = Synthetic oligonucleotide
  source 1..16: mol_type = other DNA
tgaatctcatgattgc

SEQ ID NO: 390 - DNA, 16 bp, synthetic construct
  misc_feature 1..16: note = Synthetic oligonucleotide
  source 1..16: mol_type = other DNA
gtgtggcctggccata

SEQ ID NO: 391 - DNA, 16 bp, synthetic construct
  misc_feature 1..16: note = Synthetic oligonucleotide
  source 1..16: mol_type = other DNA
cggttggtcaattccg

SEQ ID NO: 392 - DNA, 16 bp, synthetic construct
  misc_feature 1..16: note = Synthetic oligonucleotide
  source 1..16: mol_type = other DNA
cagaggctatcaacaa

SEQ ID NO: 393 - DNA, 16 bp, synthetic construct
  misc_feature 1..16: note = Synthetic oligonucleotide
  source 1..16: mol_type = other DNA
gttctgacaatgacca

SEQ ID NO: 394 - DNA, 16 bp, synthetic construct
  misc_feature 1..16: note = Synthetic oligonucleotide
  source 1..16: mol_type = other DNA
aggaggtgagcctacc

SEQ ID NO: 395 - DNA, 16 bp, synthetic construct
  misc_feature 1..16: note = Synthetic oligonucleotide
  source 1..16: mol_type = other DNA
ttgagtcatttgctag

SEQ ID NO: 396 - DNA, 16 bp, synthetic construct
  misc_feature 1..16: note = Synthetic oligonucleotide
  source 1..16: mol_type = other DNA
gggaggtgacaggtcg

SEQ ID NO: 397 - DNA, 16 bp, synthetic construct
  misc_feature 1..16: note = Synthetic oligonucleotide
  source 1..16: mol_type = other DNA
cccgatacattcccac

SEQ ID NO: 398 - DNA, 16 bp, synthetic construct
  misc_feature 1..16: note = Synthetic oligonucleotide
  source 1..16: mol_type = other DNA
catggtacaggagaag

SEQ ID NO: 399 - DNA, 16 bp, synthetic construct
  misc_feature 1..16: note = Synthetic oligonucleotide
  source 1..16: mol_type = other DNA
gggaggccctattgtg

SEQ ID NO: 400 - DNA, 16 bp, synthetic construct
  misc_feature 1..16: note = Synthetic oligonucleotide
  source 1..16: mol_type = other DNA
tctattgggcctcaga

SEQ ID NO: 401 - DNA, 16 bp, synthetic construct
  misc_feature 1..16: note = Synthetic oligonucleotide
  source 1..16: mol_type = other DNA
catagcacgaagcctc

SEQ ID NO: 402 - DNA, 16 bp, synthetic construct
  misc_feature 1..16: note = Synthetic oligonucleotide
  source 1..16: mol_type = other DNA
tttcatattcacccga

SEQ ID NO: 403 - DNA, 16 bp, synthetic construct
  misc_feature 1..16: note = Synthetic oligonucleotide
  source 1..16: mol_type = other DNA
ggtaaacccaaacagg

SEQ ID NO: 404 - DNA, 16 bp, synthetic construct
  misc_feature 1..16: note = Synthetic oligonucleotide
  source 1..16: mol_type = other DNA
acctgtattcggagac

SEQ ID NO: 405 - DNA, 16 bp, synthetic construct
  misc_feature 1..16: note = Synthetic oligonucleotide
  source 1..16: mol_type = other DNA
gcatcaaaaacctggg

SEQ ID NO: 406 - DNA, 16 bp, synthetic construct
  misc_feature 1..16: note = Synthetic oligonucleotide
  source 1..16: mol_type = other DNA
cttatgcttactccac

SEQ ID NO: 407 - DNA, 16 bp, synthetic construct
  misc_feature 1..16: note = Synthetic oligonucleotide
  source 1..16: mol_type = other DNA
tatgcccatgtttggt

SEQ ID NO: 408 - DNA, 16 bp, synthetic construct
  misc_feature 1..16: note = Synthetic oligonucleotide
  source 1..16: mol_type = other DNA
accctccttgtctcac

SEQ ID NO: 409 - DNA, 16 bp, synthetic construct
  misc_feature 1..16: note = Synthetic oligonucleotide
  source 1..16: mol_type = other DNA
cagctaagaccagtga

SEQ ID NO: 410 - DNA, 16 bp, synthetic construct
  misc_feature 1..16: note = Synthetic oligonucleotide
  source 1..16: mol_type = other DNA
gctgaaaccacctgta

SEQ ID NO: 411 - DNA, 16 bp, synthetic construct
  misc_feature 1..16: note = Synthetic oligonucleotide
  source 1..16: mol_type = other DNA
tcagatgggtacttct

SEQ ID NO: 412 - DNA, 16 bp, synthetic construct
  misc_feature 1..16: note = Synthetic oligonucleotide
  source 1..16: mol_type = other DNA
ggcctttagaacagct

SEQ ID NO: 413 - DNA, 16 bp, synthetic construct
  misc_feature 1..16: note = Synthetic oligonucleotide
  source 1..16: mol_type = other DNA
gtatttcttgatgtgg

SEQ ID NO: 414 - DNA, 16 bp, synthetic construct
  misc_feature 1..16: note = Synthetic oligonucleotide
  source 1..16: mol_type = other DNA
gggcgagcgattgtct

SEQ ID NO: 415 - DNA, 16 bp, synthetic construct
  misc_feature 1..16: note = Synthetic oligonucleotide
  source 1..16: mol_type = other DNA
ttggttgccgtggcaa

SEQ ID NO: 416 - DNA, 16 bp, synthetic construct
  misc_feature 1..16: note = Synthetic oligonucleotide
  source 1..16: mol_type = other DNA
gatcatcttgttttgg

SEQ ID NO: 417 - DNA, 16 bp, synthetic construct
  misc_feature 1..16: note = Synthetic oligonucleotide
  source 1..16: mol_type = other DNA
cttgaggcacctccat

SEQ ID NO: 418 - DNA, 16 bp, synthetic construct
  misc_feature 1..16: note = Synthetic oligonucleotide
  source 1..16: mol_type = other DNA
catgcaaaggagattc

SEQ ID NO: 419 - DNA, 16 bp, synthetic construct
  misc_feature 1..16: note = Synthetic oligonucleotide
  source 1..16: mol_type = other DNA
attctcccttatagct

SEQ ID NO: 420 - DNA, 16 bp, synthetic construct
  misc_feature 1..16: note = Synthetic oligonucleotide
  source 1..16: mol_type = other DNA
cagcgagagtcaccgc

SEQ ID NO: 421 - DNA, 16 bp, synthetic construct
  misc_feature 1..16: note = Synthetic oligonucleotide
  source 1..16: mol_type = other DNA
tgtttcttgccgtgca

SEQ ID NO: 422 - DNA, 16 bp, synthetic construct
  misc_feature 1..16: note = Synthetic oligonucleotide
  source 1..16: mol_type = other DNA
gaagtcagctgccacc

SEQ ID NO: 423 - DNA, 16 bp, synthetic construct
  misc_feature 1..16: note = Synthetic oligonucleotide
  source 1..16: mol_type = other DNA
tggtaggtctacaaag

SEQ ID NO: 424 - DNA, 16 bp, synthetic construct
  misc_feature 1..16: note = Synthetic oligonucleotide
  source 1..16: mol_type = other DNA
gaccattcccagcaga

SEQ ID NO: 425 - DNA, 16 bp, synthetic construct
  misc_feature 1..16: note = Synthetic oligonucleotide
  source 1..16: mol_type = other DNA
tccagatgtgtttagg

SEQ ID NO: 426 - DNA, 16 bp, synthetic construct
  misc_feature 1..16: note = Synthetic oligonucleotide
  source 1..16: mol_type = other DNA
acacatcattgggtta

SEQ ID NO: 427 - DNA, 16 bp, synthetic construct
  misc_feature 1..16: note = Synthetic oligonucleotide
  source 1..16: mol_type = other DNA
gatcacttccatctgc

SEQ ID NO: 428 - DNA, 16 bp, synthetic construct
  misc_feature 1..16: note = Synthetic oligonucleotide
  source 1..16: mol_type = other DNA
atggtgctttggagag

SEQ ID NO: 429 - DNA, 16 bp, synthetic construct
  misc_feature 1..16: note = Synthetic oligonucleotide
  source 1..16: mol_type = other DNA
caagagagtcctcccc

SEQ ID NO: 430 - DNA, 16 bp, synthetic construct
  misc_feature 1..16: note = Synthetic oligonucleotide
  source 1..16: mol_type = other DNA
ggctctaattctatta

SEQ ID NO: 431 - DNA, 16 bp, synthetic construct
  misc_feature 1..16: note = Synthetic oligonucleotide
  source 1..16: mol_type = other DNA
ggaattgtgtgccccc

SEQ ID NO: 432 - DNA, 16 bp, synthetic construct
  misc_feature 1..16: note = Synthetic oligonucleotide
  source 1..16: mol_type = other DNA
gatgtgggacttgttt

SEQ ID NO: 433 - DNA, 16 bp, synthetic construct
  misc_feature 1..16: note = Synthetic oligonucleotide
  source 1..16: mol_type = other DNA
tgtgggagtgcataac

SEQ ID NO: 434 - DNA, 16 bp, synthetic construct
  misc_feature 1..16: note = Synthetic oligonucleotide
  source 1..16: mol_type = other DNA
agtccccaagatatac

SEQ ID NO: 435 - DNA, 16 bp, synthetic construct
  misc_feature 1..16: note = Synthetic oligonucleotide
  source 1..16: mol_type = other DNA
gcctcctccaaggaat

SEQ ID NO: 436 - DNA, 16 bp, synthetic construct
  misc_feature 1..16: note = Synthetic oligonucleotide
  source 1..16: mol_type = other DNA
gttgcaccctcgctcc

SEQ ID NO: 437 - DNA, 16 bp, synthetic construct
  misc_feature 1..16: note = Synthetic oligonucleotide
  source 1..16: mol_type = other DNA
tggtgccagcagccca

SEQ ID NO: 438 - DNA, 16 bp, synthetic construct
  misc_feature 1..16: note = Synthetic oligonucleotide
  source 1..16: mol_type = other DNA
tttctgtactgctggc

SEQ ID NO: 439 - DNA, 16 bp, synthetic construct
  misc_feature 1..16: note = Synthetic oligonucleotide
  source 1..16: mol_type = other DNA
agggcacggagccttc

SEQ ID NO: 440 - DNA, 16 bp, synthetic construct
  misc_feature 1..16: note = Synthetic oligonucleotide
  source 1..16: mol_type = other DNA
cgatggtggtgccttt

SEQ ID NO: 441 - DNA, 16 bp, synthetic construct
  misc_feature 1..16: note = Synthetic oligonucleotide
  source 1..16: mol_type = other DNA
gggtgccagacccatg

SEQ ID NO: 442 - DNA, 16 bp, synthetic construct
  misc_feature 1..16: note = Synthetic oligonucleotide
  source 1..16: mol_type = other DNA
tcccggtcaaagcggc

SEQ ID NO: 443 - DNA, 16 bp, synthetic construct
  misc_feature 1..16: note = Synthetic oligonucleotide
  source 1..16: mol_type = other DNA
accacttctttccgta

SEQ ID NO: 444 - DNA, 16 bp, synthetic construct
  misc_feature 1..16: note = Synthetic oligonucleotide
  source 1..16: mol_type = other DNA
aagttggatatgttct

SEQ ID NO: 445 - DNA, 16 bp, synthetic construct
  misc_feature 1..16: note = Synthetic oligonucleotide
  source 1..16: mol_type = other DNA
gtctgagggcacggat

SEQ ID NO: 446 - DNA, 16 bp, synthetic construct
  misc_feature 1..16: note = Synthetic oligonucleotide
  source 1..16: mol_type = other DNA
tttcagctgagattgg

SEQ ID NO: 447 - DNA, 16 bp, synthetic construct
  misc_feature 1..16: note = Synthetic oligonucleotide
  source 1..16: mol_type = other DNA
aggatgctgggttcat

SEQ ID NO: 448 - DNA, 16 bp, synthetic construct
  misc_feature 1..16: note = Synthetic oligonucleotide
  source 1..16: mol_type = other DNA
cctcatgtaagtgctt

SEQ ID NO: 449 - DNA, 16 bp, synthetic construct
  misc_feature 1..16: note = Synthetic oligonucleotide
  source 1..16: mol_type = other DNA
tggtcacagttcttgg

SEQ ID NO: 450 - DNA, 16 bp, synthetic construct
  misc_feature 1..16: note = Synthetic oligonucleotide
  source 1..16: mol_type = other DNA
actttacctcaccctc

SEQ ID NO: 451 - DNA, 16 bp, synthetic construct
  misc_feature 1..16: note = Synthetic oligonucleotide
  source 1..16: mol_type = other DNA
gcactgccatctgcat

SEQ ID NO: 452 - DNA, 16 bp, synthetic construct
  misc_feature 1..16: note = Synthetic oligonucleotide
  source 1..16: mol_type = other DNA
cggccccccaatatat

SEQ ID NO: 453 - DNA, 16 bp, synthetic construct
  misc_feature 1..16: note = Synthetic oligonucleotide
  source 1..16: mol_type = other DNA
actgttctaactcttg

SEQ ID NO: 454 - DNA, 16 bp, synthetic construct
  misc_feature 1..16: note = Synthetic oligonucleotide
  source 1..16: mol_type = other DNA
aagacttcattcttcg

SEQ ID NO: 455 - DNA, 16 bp, synthetic construct
  misc_feature 1..16: note = Synthetic oligonucleotide
  source 1..16: mol_type = other DNA
accatcatcaggaagc

SEQ ID NO: 456 - DNA, 16 bp, synthetic construct
  misc_feature 1..16: note = Synthetic oligonucleotide
  source 1..16: mol_type = other DNA
gggaccatggccatgg

SEQ ID NO: 457 - DNA, 16 bp, synthetic construct
  misc_feature 1..16: note = Synthetic oligonucleotide
  source 1..16: mol_type = other DNA
agatctgagcttcctc

SEQ ID NO: 458 - DNA, 16 bp, synthetic construct
  misc_feature 1..16: note = Synthetic oligonucleotide
  source 1..16: mol_type = other DNA
ttgatgagtaggtgag

SEQ ID NO: 459 - DNA, 16 bp, synthetic construct
  misc_feature 1..16: note = Synthetic oligonucleotide
  source 1..16: mol_type = other DNA
ttgaatctcatgattg

SEQ ID NO: 460 - DNA, 16 bp, synthetic construct
  misc_feature 1..16: note = Synthetic oligonucleotide
  source 1..16: mol_type = other DNA
tgttgcccccattggg

SEQ ID NO: 461 - DNA, 16 bp, synthetic construct
  misc_feature 1..16: note = Synthetic oligonucleotide
  source 1..16: mol_type = other DNA
tctgccggttggtcaa

SEQ ID NO: 462 - DNA, 16 bp, synthetic construct
  misc_feature 1..16: note = Synthetic oligonucleotide
  source 1..16: mol_type = other DNA
gaatgagcaggtcaga

SEQ ID NO: 463 - DNA, 16 bp, synthetic construct
  misc_feature 1..16: note = Synthetic oligonucleotide
  source 1..16: mol_type = other DNA
ggttctgacaatgacc

SEQ ID NO: 464 - DNA, 16 bp, synthetic construct
  misc_feature 1..16: note = Synthetic oligonucleotide
  source 1..16: mol_type = other DNA
gaggaggtgagcctac

SEQ ID NO: 465 - DNA, 16 bp, synthetic construct
  misc_feature 1..16: note = Synthetic oligonucleotide
  source 1..16: mol_type = other DNA
cttgagtcatttgcta

SEQ ID NO: 466 - DNA, 16 bp, synthetic construct
  misc_feature 1..16: note = Synthetic oligonucleotide
  source 1..16: mol_type = other DNA
cgggaggtgacaggtc

SEQ ID NO: 467 - DNA, 16 bp, synthetic construct
  misc_feature 1..16: note = Synthetic oligonucleotide
  source 1..16: mol_type = other DNA
gcccgatacattccca

SEQ ID NO: 468 - DNA, 16 bp, synthetic construct
  misc_feature 1..16: note = Synthetic oligonucleotide
  source 1..16: mol_type = other DNA
ctcatggtacaggaga

SEQ ID NO: 469 - DNA, 16 bp, synthetic construct
  misc_feature 1..16: note = Synthetic oligonucleotide
  source 1..16: mol_type = other DNA
agggaggccctattgt

SEQ ID NO: 470 - DNA, 16 bp, synthetic construct
  misc_feature 1..16: note = Synthetic oligonucleotide
  source 1..16: mol_type = other DNA
ttctattgggcctcag

SEQ ID NO: 471 - DNA, 16 bp, synthetic construct
  misc_feature 1..16: note = Synthetic oligonucleotide
  source 1..16: mol_type = other DNA
ccatagcacgaagcct

SEQ ID NO: 472 - DNA, 16 bp, synthetic construct
  misc_feature 1..16: note = Synthetic oligonucleotide
  source 1..16: mol_type = other DNA
gtttcatattcacccg

SEQ ID NO: 473 - DNA, 16 bp, synthetic construct
  misc_feature 1..16: note = Synthetic oligonucleotide
  source 1..16: mol_type = other DNA
aggtaaacccaaacag

SEQ ID NO: 474 - DNA, 16 bp, synthetic construct
  misc_feature 1..16: note = Synthetic oligonucleotide
  source 1..16: mol_type = other DNA
cacctgtattcggaga

SEQ ID NO: 475 - DNA, 16 bp, synthetic construct
  misc_feature 1..16: note = Synthetic oligonucleotide
  source 1..16: mol_type = other DNA
agcatcaaaaacctgg

SEQ ID NO: 476 - DNA, 16 bp, synthetic construct
  misc_feature 1..16: note = Synthetic oligonucleotide
  source 1..16: mol_type = other DNA
ccttatgcttactcca

SEQ ID NO: 477 - DNA, 16 bp, synthetic construct
  misc_feature 1..16: note = Synthetic oligonucleotide
  source 1..16: mol_type = other DNA
gtatgcccatgtttgg

SEQ ID NO: 478 - DNA, 16 bp, synthetic construct
  misc_feature 1..16: note = Synthetic oligonucleotide
  source 1..16: mol_type = other DNA
taccctccttgtctca

SEQ ID NO: 479 - DNA, 16 bp, synthetic construct
  misc_feature 1..16: note = Synthetic oligonucleotide
  source 1..16: mol_type = other DNA
tcagctaagaccagtg

SEQ ID NO: 480 - DNA, 16 bp, synthetic construct
  misc_feature 1..16: note = Synthetic oligonucleotide
  source 1..16: mol_type = other DNA
ttgctgaaaccacctg

SEQ ID NO: 481 - DNA, 16 bp, synthetic construct
  misc_feature 1..16: note = Synthetic oligonucleotide
  source 1..16: mol_type = other DNA
atcagatgggtacttc

SEQ ID NO: 482 - DNA, 16 bp, synthetic construct
  misc_feature 1..16: note = Synthetic oligonucleotide
  source 1..16: mol_type = other DNA
aggcctttagaacagc

SEQ ID NO: 483 - DNA, 16 bp, synthetic construct
  misc_feature 1..16: note = Synthetic oligonucleotide
  source 1..16: mol_type = other DNA
cactaaatctgtgtat

SEQ ID NO: 484 - DNA, 16 bp, synthetic construct
  misc_feature 1..16: note = Synthetic oligonucleotide
  source 1..16: mol_type = other DNA
tgggcgagcgattgtc

SEQ ID NO: 485 - DNA, 16 bp, synthetic construct
  misc_feature 1..16: note = Synthetic oligonucleotide
  source 1..16: mol_type = other DNA
cttggttgccgtggca

SEQ ID NO: 486 - DNA, 16 bp, synthetic construct
  misc_feature 1..16: note = Synthetic oligonucleotide
  source 1..16: mol_type = other DNA
ctgttattaaaccaca

SEQ ID NO: 487 - DNA, 16 bp, synthetic construct
  misc_feature 1..16: note = Synthetic oligonucleotide
  source 1..16: mol_type = other DNA
ccttgaggcacctcca

SEQ ID NO: 488 - DNA, 16 bp, synthetic construct
  misc_feature 1..16: note = Synthetic oligonucleotide
  source 1..16: mol_type = other DNA
ccatgcaaaggagatt

SEQ ID NO: 489 - DNA, 16 bp, synthetic construct
  misc_feature 1..16: note = Synthetic oligonucleotide
  source 1..16: mol_type = other DNA
cattctcccttatagc

SEQ ID NO: 490 - DNA, 16 bp, synthetic construct
  misc_feature 1..16: note = Synthetic oligonucleotide
  source 1..16: mol_type = other DNA
acagcgagagtcaccg

SEQ ID NO: 491 - DNA, 16 bp, synthetic construct
  misc_feature 1..16: note = Synthetic oligonucleotide
  source 1..16: mol_type = other DNA
ttgtttcttgccgtgc

SEQ ID NO: 492 - DNA, 16 bp, synthetic construct
  misc_feature 1..16: note = Synthetic oligonucleotide
  source 1..16: mol_type = other DNA
tgaagtcagctgccac

SEQ ID NO: 493 - DNA, 16 bp, synthetic construct
  misc_feature 1..16: note = Synthetic oligonucleotide
  source 1..16: mol_type = other DNA
atggtaggtctacaaa

SEQ ID NO: 494 - DNA, 16 bp, synthetic construct
  misc_feature 1..16: note = Synthetic oligonucleotide
  source 1..16: mol_type = other DNA
attcctgaccattccc

SEQ ID NO: 495 - DNA, 16 bp, synthetic construct
  misc_feature 1..16: note = Synthetic oligonucleotide
  source 1..16: mol_type = other DNA
atccagatgtgtttag

SEQ ID NO: 496 - DNA, 16 bp, synthetic construct
  misc_feature 1..16: note = Synthetic oligonucleotide
  source 1..16: mol_type = other DNA
aacacatcattgggtt

SEQ ID NO: 497 - DNA, 16 bp, synthetic construct
  misc_feature 1..16: note = Synthetic oligonucleotide
  source 1..16: mol_type = other DNA
tgatcacttccatctg

SEQ ID NO: 498 - DNA, 16 bp, synthetic construct
  misc_feature 1..16: note = Synthetic oligonucleotide
  source 1..16: mol_type = other DNA
catggtgctttggaga

SEQ ID NO: 499 - DNA, 16 bp, synthetic construct
  misc_feature 1..16: note = Synthetic oligonucleotide
  source 1..16: mol_type = other DNA
cataagccagcaagag

SEQ ID NO: 500 - DNA, 16 bp, synthetic construct
  misc_feature 1..16: note = Synthetic oligonucleotide
  source 1..16: mol_type = other DNA
gggctctaattctatt

SEQ ID NO: 501 - DNA, 16 bp, synthetic construct
  misc_feature 1..16: note = Synthetic oligonucleotide
  source 1..16: mol_type = other DNA
gggaattgtgtgcccc

SEQ ID NO: 502 - DNA, 16 bp, synthetic construct
  misc_feature 1..16: note = Synthetic oligonucleotide
  source 1..16: mol_type = other DNA
tgatgtgggacttgtt

SEQ ID NO: 503 - DNA, 16 bp, synthetic construct
  misc_feature 1..16: note = Synthetic oligonucleotide
  source 1..16: mol_type = other DNA
gtgtgggagtgcataa

SEQ ID NO: 504 - DNA, 16 bp, synthetic construct
  misc_feature 1..16: note = Synthetic oligonucleotide
  source 1..16: mol_type = other DNA
cagtccccaagatata

SEQ ID NO: 505 - DNA, 16 bp, synthetic construct
  misc_feature 1..16: note = Synthetic oligonucleotide
  source 1..16: mol_type = other DNA
gggcctcctccaagga

SEQ ID NO: 506 - DNA, 16 bp, synthetic construct
  misc_feature 1..16: note = Synthetic oligonucleotide
  source 1..16: mol_type = other DNA
tgttgcaccctcgctc

SEQ ID NO: 507 - DNA, 16 bp, synthetic construct
  misc_feature 1..16: note = Synthetic oligonucleotide
  source 1..16: mol_type = other DNA
atggtgccagcagccc

SEQ ID NO: 508 - DNA, 16 bp, synthetic construct
  misc_feature 1..16: note = Synthetic oligonucleotide
  source 1..16: mol_type = other DNA
gtttctgtactgctgg

SEQ ID NO: 509 - DNA, 16 bp, synthetic construct
  misc_feature 1..16: note = Synthetic oligonucleotide
  source 1..16: mol_type = other DNA
aagggcacggagcctt

SEQ ID NO: 510 - DNA, 16 bp, synthetic construct
  misc_feature 1..16: note = Synthetic oligonucleotide
  source 1..16: mol_type = other DNA
gcgatggtggtgcctt

SEQ ID NO: 511 - DNA, 16 bp, synthetic construct
  misc_feature 1..16: note = Synthetic oligonucleotide
  source 1..16: mol_type = other DNA
agggtgccagacccat

SEQ ID NO: 512 - DNA, 16 bp, synthetic construct
  misc_feature 1..16: note = Synthetic oligonucleotide
  source 1..16: mol_type = other DNA
atcccggtcaaagcgg

SEQ ID NO: 513 - DNA, 16 bp, synthetic construct
  misc_feature 1..16: note = Synthetic oligonucleotide
  source 1..16: mol_type = other DNA
caccacttctttccgt

SEQ ID NO: 514 - DNA, 16 bp, synthetic construct
  misc_feature 1..16: note = Synthetic oligonucleotide
  source 1..16: mol_type = other DNA
gaaagttggatatgtt

SEQ ID NO: 515 - DNA, 16 bp, synthetic construct
  misc_feature 1..16: note = Synthetic oligonucleotide
  source 1..16: mol_type = other DNA
cgtctgagggcacgga

SEQ ID NO: 516 - DNA, 16 bp, synthetic construct
  misc_feature 1..16: note = Synthetic oligonucleotide
  source 1..16: mol_type = other DNA
ctttcagctgagattg

SEQ ID NO: 517 - DNA, 16 bp, synthetic construct
  misc_feature 1..16: note = Synthetic oligonucleotide
  source 1..16: mol_type = other DNA
caggatgctgggttca

SEQ ID NO: 518 - DNA, 16 bp, synthetic construct
  misc_feature 1..16: note = Synthetic oligonucleotide
  source 1..16: mol_type = other DNA
ccctcatgtaagtgct

SEQ ID NO: 519 - DNA, 16 bp, synthetic construct
  misc_feature 1..16: note = Synthetic oligonucleotide
  source 1..16: mol_type = other DNA
gtggtcacagttcttg

SEQ ID NO: 520 - DNA, 16 bp, synthetic construct
  misc_feature 1..16: note = Synthetic oligonucleotide
  source 1..16: mol_type = other DNA
aactttacctcaccct

SEQ ID NO: 521 - DNA, 16 bp, synthetic construct
  misc_feature 1..16: note = Synthetic oligonucleotide
  source 1..16: mol_type = other DNA
tccttgctgcactgcc

SEQ ID NO: 522 - DNA, 16 bp, synthetic construct
  misc_feature 1..16: note = Synthetic oligonucleotide
  source 1..16: mol_type = other DNA
ccggccccccaatata

SEQ ID NO: 523 - DNA, 16 bp, synthetic construct
  misc_feature 1..16: note = Synthetic oligonucleotide
  source 1..16: mol_type = other DNA
caactgttctaactct

SEQ ID NO: 524 - DNA, 16 bp, synthetic construct
  misc_feature 1..16: note = Synthetic oligonucleotide
  source 1..16: mol_type = other DNA
gcccccaggaggacaa

SEQ ID NO: 525 - DNA, 16 bp, synthetic construct
  misc_feature 1..16: note = Synthetic oligonucleotide
  source 1..16: mol_type = other DNA
gaccatcatcaggaag

SEQ ID NO: 526 - DNA, 16 bp, synthetic construct
  misc_feature 1..16: note = Synthetic oligonucleotide
  source 1..16: mol_type = other DNA
cacatactctctggga

SEQ ID NO: 527 - DNA, 16 bp, synthetic construct
  misc_feature 1..16: note = Synthetic oligonucleotide
  source 1..16: mol_type = other DNA
gagatctgagcttcct

SEQ ID NO: 528 - DNA, 16 bp, synthetic construct
  misc_feature 1..16: note = Synthetic oligonucleotide
  source 1..16: mol_type = other DNA
cttgatgagtaggtga

SEQ ID NO: 529 - DNA, 16 bp, synthetic construct
  misc_feature 1..16: note = Synthetic oligonucleotide
  source 1..16: mol_type = other DNA
ttctgttgcccccatt

SEQ ID NO: 530 - DNA, 16 bp, synthetic construct
  misc_feature 1..16: note = Synthetic oligonucleotide
  source 1..16: mol_type = other DNA
ctgggcgagtctgccg

SEQ ID NO: 531 - DNA, 16 bp, synthetic construct
  misc_feature 1..16: note = Synthetic oligonucleotide
  source 1..16: mol_type = other DNA
gtagaatgagcaggtc

SEQ ID NO: 532 - DNA, 16 bp, synthetic construct
  misc_feature 1..16: note = Synthetic oligonucleotide
  source 1..16: mol_type = other DNA
agagtctatacacaga

SEQ ID NO: 533 - DNA, 16 bp, synthetic construct
  misc_feature 1..16: note = Synthetic oligonucleotide
  source 1..16: mol_type = other DNA
gagtaggaaccagcag

SEQ ID NO: 534 - DNA, 16 bp, synthetic construct
  misc_feature 1..16: note = Synthetic oligonucleotide
  source 1..16: mol_type = other DNA
acttgagtcatttgct

SEQ ID NO: 535 - DNA, 16 bp, synthetic construct
  misc_feature 1..16: note = Synthetic oligonucleotide
  source 1..16: mol_type = other DNA
gcgggaggtgacaggt

SEQ ID NO: 536 - DNA, 16 bp, synthetic construct
  misc_feature 1..16: note = Synthetic oligonucleotide
  source 1..16: mol_type = other DNA
ggcccgatacattccc

SEQ ID NO: 537 - DNA, 16 bp, synthetic construct
  misc_feature 1..16: note = Synthetic oligonucleotide
  source 1..16: mol_type = other DNA
tctcatggtacaggag

SEQ ID NO: 538 - DNA, 16 bp, synthetic construct
  misc_feature 1..16: note = Synthetic oligonucleotide
  source 1..16: mol_type = other DNA
tagggaggccctattg

SEQ ID NO: 539 - DNA, 16 bp, synthetic construct
  misc_feature 1..16: note = Synthetic oligonucleotide
  source 1..16: mol_type = other DNA
attctattgggcctca

SEQ ID NO: 540 - DNA, 16 bp, synthetic construct
  misc_feature 1..16: note = Synthetic oligonucleotide
  source 1..16: mol_type = other DNA
caccatagcacgaagc

SEQ ID NO: 541 - DNA, 16 bp, synthetic construct
  misc_feature 1..16: note = Synthetic oligonucleotide
  source 1..16: mol_type = other DNA
agtttcatattcaccc

SEQ ID NO: 542 - DNA, 16 bp, synthetic construct
  misc_feature 1..16: note = Synthetic oligonucleotide
  source 1..16: mol_type = other DNA
caaggtaaacccaaac

SEQ ID NO: 543 - DNA, 16 bp, synthetic construct
  misc_feature 1..16: note = Synthetic oligonucleotide
  source 1..16: mol_type = other DNA
tcacctgtattcggag

SEQ ID NO: 544 - DNA, 16 bp, synthetic construct
  misc_feature 1..16: note = Synthetic oligonucleotide
  source 1..16: mol_type = other DNA
ctaaaagctgatttgc

SEQ ID NO: 545 - DNA, 16 bp, synthetic construct
  misc_feature 1..16: note = Synthetic oligonucleotide
  source 1..16: mol_type = other DNA
tccttatgcttactcc

SEQ ID NO: 546 - DNA, 16 bp, synthetic construct
  misc_feature 1..16: note = Synthetic oligonucleotide
  source 1..16: mol_type = other DNA
catgtatgcccatgtt

SEQ ID NO: 547 - DNA, 16 bp, synthetic construct
  misc_feature 1..16: note = Synthetic oligonucleotide
  source 1..16: mol_type = other DNA
ataccctccttgtctc

SEQ ID NO: 548 - DNA, 16 bp, synthetic construct
  misc_feature 1..16: note = Synthetic oligonucleotide
  source 1..16: mol_type = other DNA
ttcagctaagaccagt

SEQ ID NO: 549 - DNA, 16 bp, synthetic construct
  misc_feature 1..16: note = Synthetic oligonucleotide
  source 1..16: mol_type = other DNA
gttgctgaaaccacct

SEQ ID NO: 550 - DNA, 16 bp, synthetic construct
  misc_feature 1..16: note = Synthetic oligonucleotide
  source 1..16: mol_type = other DNA
tatcagatgggtactt

SEQ ID NO: 551 - DNA, 16 bp, synthetic construct
  misc_feature 1..16: note = Synthetic oligonucleotide
  source 1..16: mol_type = other DNA
gaggcctttagaacag

SEQ ID NO: 552 - DNA, 16 bp, synthetic construct
  misc_feature 1..16: note = Synthetic oligonucleotide
  source 1..16: mol_type = other DNA
gcactaaatctgtgta

SEQ ID NO: 553 - DNA, 16 bp, synthetic construct
  misc_feature 1..16: note = Synthetic oligonucleotide
  source 1..16: mol_type = other DNA
ctgggcgagcgattgt

SEQ ID NO: 554 - DNA, 16 bp, synthetic construct
  misc_feature 1..16: note = Synthetic oligonucleotide
  source 1..16: mol_type = other DNA
acttggttgccgtggc

SEQ ID NO: 555 - DNA, 16 bp, synthetic construct
  misc_feature 1..16: note = Synthetic oligonucleotide
  source 1..16: mol_type = other DNA
cctgttattaaaccac

SEQ ID NO: 556 - DNA, 16 bp, synthetic construct
  misc_feature 1..16: note = Synthetic oligonucleotide
  source 1..16: mol_type = other DNA
tccttgaggcacctcc

SEQ ID NO: 557 - DNA, 16 bp, synthetic construct
  misc_feature 1..16: note = Synthetic oligonucleotide
  source 1..16: mol_type = other DNA
accatgcaaaggagat

SEQ ID NO: 558 - DNA, 16 bp, synthetic construct
  misc_feature 1..16: note = Synthetic oligonucleotide
  source 1..16: mol_type = other DNA
gcattctcccttatag

SEQ ID NO: 559 - DNA, 16 bp, synthetic construct
  misc_feature 1..16: note = Synthetic oligonucleotide
  source 1..16: mol_type = other DNA
gacagcgagagtcacc

SEQ ID NO: 560 - DNA, 16 bp, synthetic construct
  misc_feature 1..16: note = Synthetic oligonucleotide
  source 1..16: mol_type = other DNA
attgtttcttgccgtg

SEQ ID NO: 561 - DNA, 16 bp, synthetic construct
  misc_feature 1..16: note = Synthetic oligonucleotide
  source 1..16: mol_type = other DNA
tcctgaagtcagctgc

SEQ ID NO: 562 - DNA, 16 bp, synthetic construct
  misc_feature 1..16: note = Synthetic oligonucleotide
  source 1..16: mol_type = other DNA
aatggtaggtctacaa

SEQ ID NO: 563 - DNA, 16 bp, synthetic construct
  misc_feature 1..16: note = Synthetic oligonucleotide
  source 1..16: mol_type = other DNA
tattcctgaccattcc

SEQ ID NO: 564 - DNA, 16 bp, synthetic construct
  misc_feature 1..16: note = Synthetic oligonucleotide
  source 1..16: mol_type = other DNA
aatccagatgtgttta

SEQ ID NO: 565 - DNA, 16 bp, synthetic construct
  misc_feature 1..16: note = Synthetic oligonucleotide
  source 1..16: mol_type = other DNA
tcaacacatcattggg

SEQ ID NO: 566 - DNA, 16 bp, synthetic construct
  misc_feature 1..16: note = Synthetic oligonucleotide
  source 1..16: mol_type = other DNA
gtgatcacttccatct

SEQ ID NO: 567 - DNA, 16 bp, synthetic construct
  misc_feature 1..16: note = Synthetic oligonucleotide
  source 1..16: mol_type = other DNA
ccatggtgctttggag

SEQ ID NO: 568 - DNA, 16 bp, synthetic construct
  misc_feature 1..16: note = Synthetic oligonucleotide
  source 1..16: mol_type = other DNA
ccataagccagcaaga

SEQ ID NO: 569 - DNA, 16 bp, synthetic construct
  misc_feature 1..16: note = Synthetic oligonucleotide
  source 1..16: mol_type = other DNA
agggctctaattctat

SEQ ID NO: 570 - DNA, 16 bp, synthetic construct
  misc_feature 1..16: note = Synthetic oligonucleotide
  source 1..16: mol_type = other DNA
agggaattgtgtgccc

SEQ ID NO: 571 - DNA, 16 bp, synthetic construct
  misc_feature 1..16: note = Synthetic oligonucleotide
  source 1..16: mol_type = other DNA
gtgatgtgggacttgt

SEQ ID NO: 572 - DNA, 16 bp, synthetic construct
  misc_feature 1..16: note = Synthetic oligonucleotide
  source 1..16: mol_type = other DNA
agtgtgggagtgcata

SEQ ID NO: 573 - DNA, 16 bp, synthetic construct
  misc_feature 1..16: note = Synthetic oligonucleotide
  source 1..16: mol_type = other DNA
ccagtccccaagatat

SEQ ID NO: 574 - DNA, 16 bp, synthetic construct
  misc_feature 1..16: note = Synthetic oligonucleotide
  source 1..16: mol_type = other DNA
tcgctgcagggcctcc

SEQ ID NO: 575 - DNA, 16 bp, synthetic construct
  misc_feature 1..16: note = Synthetic oligonucleotide
  source 1..16: mol_type = other DNA
ttgttgcaccctcgct

SEQ ID NO: 576 - DNA, 16 bp, synthetic construct
  misc_feature 1..16: note = Synthetic oligonucleotide
  source 1..16: mol_type = other DNA
tctctgggtccatggt

SEQ ID NO: 577 - DNA, 16 bp, synthetic construct
  misc_feature 1..16: note = Synthetic oligonucleotide
  source 1..16: mol_type = other DNA
agtttctgtactgctg

SEQ ID NO: 578 - DNA, 16 bp, synthetic construct
  misc_feature 1..16: note = Synthetic oligonucleotide
  source 1..16: mol_type = other DNA
caagggcacggagcct

SEQ ID NO: 579 - DNA, 16 bp, synthetic construct
  misc_feature 1..16: note = Synthetic oligonucleotide
  source 1..16: mol_type = other DNA
ggcgatggtggtgcct

SEQ ID NO: 580 - DNA, 16 bp, synthetic construct
  misc_feature 1..16: note = Synthetic oligonucleotide
  source 1..16: mol_type = other DNA
ctctgtgaagggtgcc

SEQ ID NO: 581 - DNA, 16 bp, synthetic construct
  misc_feature 1..16: note = Synthetic oligonucleotide
  source 1..16: mol_type = other DNA
aatcccggtcaaagcg

SEQ ID NO: 582 - DNA, 16 bp, synthetic construct
  misc_feature 1..16: note = Synthetic oligonucleotide
  source 1..16: mol_type = other DNA
ccaccacttctttccg

SEQ ID NO: 583 - DNA, 16 bp, synthetic construct
  misc_feature 1..16: note = Synthetic oligonucleotide
  source 1..16: mol_type = other DNA
attgccagctaaggaa

SEQ ID NO: 584 - DNA, 16 bp, synthetic construct
  misc_feature 1..16: note = Synthetic oligonucleotide
  source 1..16: mol_type = other DNA
gattggctctggctcg

SEQ ID NO: 585 - DNA, 16 bp, synthetic construct
  misc_feature 1..16: note = Synthetic oligonucleotide
  source 1..16: mol_type = other DNA
gctttcagctgagatt

SEQ ID NO: 586 - DNA, 16 bp, synthetic construct
  misc_feature 1..16: note = Synthetic oligonucleotide
  source 1..16: mol_type = other DNA
gactcctctgctcatt

SEQ ID NO: 587 - DNA, 16 bp, synthetic construct
  misc_feature 1..16: note = Synthetic oligonucleotide
  source 1..16: mol_type = other DNA
cccctcatgtaagtgc

SEQ ID NO: 588 - DNA, 16 bp, synthetic construct
  misc_feature 1..16: note = Synthetic oligonucleotide
  source 1..16: mol_type = other DNA
gccctgtggtcacagt

SEQ ID NO: 589 - DNA, 16 bp, synthetic construct
  misc_feature 1..16: note = Synthetic oligonucleotide
  source 1..16: mol_type = other DNA
aaactttacctcaccc

SEQ ID NO: 590 - DNA, 16 bp, synthetic construct
  misc_feature 1..16: note = Synthetic oligonucleotide
  source 1..16: mol_type = other DNA
tctccttgctgcactg

SEQ ID NO: 591 - DNA, 16 bp, synthetic construct
  misc_feature 1..16: note = Synthetic oligonucleotide
  source 1..16: mol_type = other DNA
cccggccccccaatat

SEQ ID NO: 592 - DNA, 16 bp, synthetic construct
  misc_feature 1..16: note = Synthetic oligonucleotide
  source 1..16: mol_type = other DNA
ccaactgttctaactc

SEQ ID NO: 593 - DNA, 16 bp, synthetic construct
  misc_feature 1..16: note = Synthetic oligonucleotide
  source 1..16: mol_type = other DNA
atgcccccaggaggac

SEQ ID NO: 594 - DNA, 16 bp, synthetic construct
  misc_feature 1..16: note = Synthetic oligonucleotide
  source 1..16: mol_type = other DNA
caatgaccatcatcag

SEQ ID NO: 595 - DNA, 16 bp, synthetic construct
  misc_feature 1..16: note = Synthetic oligonucleotide
  source 1..16: mol_type = other DNA
tcacatactctctggg

SEQ ID NO: 596 - DNA, 16 bp, synthetic construct
  misc_feature 1..16: note = Synthetic oligonucleotide
  source 1..16: mol_type = other DNA
agagatctgagcttcc

SEQ ID NO: 597 - DNA, 16 bp, synthetic construct
  misc_feature 1..16: note = Synthetic oligonucleotide
  source 1..16: mol_type = other DNA
gcttgatgagtaggtg

SEQ ID NO: 598 - DNA, 16 bp, synthetic construct
  misc_feature 1..16: note = Synthetic oligonucleotide
  source 1..16: mol_type = other DNA
tcctccttgagcagga

SEQ ID NO: 599 - DNA, 16 bp, synthetic construct
  misc_feature 1..16: note = Synthetic oligonucleotide
  source 1..16: mol_type = other DNA
tgaactccttgtacct

SEQ ID NO: 600 - DNA, 16 bp, synthetic construct
  misc_feature 1..16: note = Synthetic oligonucleotide
  source 1..16: mol_type = other DNA
gtcctccctgggcgag

SEQ ID NO: 601 - DNA, 16 bp, synthetic construct
  misc_feature 1..16: note = Synthetic oligonucleotide
  source 1..16: mol_type = other DNA
ccacatttgagattat

SEQ ID NO: 602 - DNA, 16 bp, synthetic construct
  misc_feature 1..16: note = Synthetic oligonucleotide
  source 1..16: mol_type = other DNA
cgggcagccatctgat

SEQ ID NO: 603 - DNA, 16 bp, synthetic construct
  misc_feature 1..16: note = Synthetic oligonucleotide
  source 1..16: mol_type = other DNA
caccctccattctaag

SEQ ID NO: 604 - DNA, 16 bp, synthetic construct
  misc_feature 1..16: note = Synthetic oligonucleotide
  source 1..16: mol_type = other DNA
cacttgagtcatttgc

SEQ ID NO: 605 - DNA, 16 bp, synthetic construct
  misc_feature 1..16: note = Synthetic oligonucleotide
  source 1..16: mol_type = other DNA
agcgggaggtgacagg

SEQ ID NO: 606 - DNA, 16 bp, synthetic construct
  misc_feature 1..16: note = Synthetic oligonucleotide
  source 1..16: mol_type = other DNA
aggcccgatacattcc

SEQ ID NO: 607 - DNA, 16 bp, synthetic construct
  misc_feature 1..16: note = Synthetic oligonucleotide
  source 1..16: mol_type = other DNA
ttctcatggtacagga

SEQ ID NO: 608 - DNA, 16 bp, synthetic construct
  misc_feature 1..16: note = Synthetic oligonucleotide
  source 1..16: mol_type = other DNA
ttagggaggccctatt

SEQ ID NO: 609 - DNA, 16 bp, synthetic construct
  misc_feature 1..16: note = Synthetic oligonucleotide
  source 1..16: mol_type = other DNA
aattctattgggcctc

SEQ ID NO: 610 - DNA, 16 bp, synthetic construct
  misc_feature 1..16: note = Synthetic oligonucleotide
  source 1..16: mol_type = other DNA
tcaccatagcacgaag

SEQ ID NO: 611 - DNA, 16 bp, synthetic construct
  misc_feature 1..16: note = Synthetic oligonucleotide
  source 1..16: mol_type = other DNA
gcagtttcatattcac

SEQ ID NO: 612 - DNA, 16 bp, synthetic construct
  misc_feature 1..16: note = Synthetic oligonucleotide
  source 1..16: mol_type = other DNA
gattttccaacaaggt

SEQ ID NO: 613 - DNA, 16 bp, synthetic construct
  misc_feature 1..16: note = Synthetic oligonucleotide
  source 1..16: mol_type = other DNA
ctcacctgtattcgga

SEQ ID NO: 614 - DNA, 16 bp, synthetic construct
  misc_feature 1..16: note = Synthetic oligonucleotide
  source 1..16: mol_type = other DNA
gcactaaaagctgatt

SEQ ID NO: 615 - DNA, 16 bp, synthetic construct
  misc_feature 1..16: note = Synthetic oligonucleotide
  source 1..16: mol_type = other DNA
gaaatccttatgctta

SEQ ID NO: 616 - DNA, 16 bp, synthetic construct
  misc_feature 1..16: note = Synthetic oligonucleotide
  source 1..16: mol_type = other DNA
ccatgtatgcccatgt

SEQ ID NO: 617 - DNA, 16 bp, synthetic construct
  misc_feature 1..16: note = Synthetic oligonucleotide
  source 1..16: mol_type = other DNA
cataccctccttgtct

SEQ ID NO: 618 - DNA, 16 bp, synthetic construct
  misc_feature 1..16: note = Synthetic oligonucleotide
  source 1..16: mol_type = other DNA
aattcagctaagacca

SEQ ID NO: 619 - DNA, 16 bp, synthetic construct
  misc_feature 1..16: note = Synthetic oligonucleotide
  source 1..16: mol_type = other DNA
agttgctgaaaccacc

SEQ ID NO: 620 - DNA, 16 bp, synthetic construct
  misc_feature 1..16: note = Synthetic oligonucleotide
  source 1..16: mol_type = other DNA
atatcagatgggtact

SEQ ID NO: 621 - DNA, 16 bp, synthetic construct
  misc_feature 1..16: note = Synthetic oligonucleotide
  source 1..16: mol_type = other DNA
cgaggcctttagaaca

SEQ ID NO: 622 - DNA, 16 bp, synthetic construct
  misc_feature 1..16: note = Synthetic oligonucleotide
  source 1..16: mol_type = other DNA
ggcactaaatctgtgt

SEQ ID NO: 623 - DNA, 16 bp, synthetic construct
  misc_feature 1..16: note = Synthetic oligonucleotide
  source 1..16: mol_type = other DNA
gctgggcgagcgattg

SEQ ID NO: 624 - DNA, 16 bp, synthetic construct
  misc_feature 1..16: note = Synthetic oligonucleotide
  source 1..16: mol_type = other DNA
gacttggttgccgtgg

SEQ ID NO: 625 - DNA, 16 bp, synthetic construct
  misc_feature 1..16: note = Synthetic oligonucleotide
  source 1..16: mol_type = other DNA
gcctgttattaaacca

SEQ ID NO: 626 - DNA, 16 bp, synthetic construct
  misc_feature 1..16: note = Synthetic oligonucleotide
  source 1..16: mol_type = other DNA
atccttgaggcacctc

SEQ ID NO: 627 - DNA, 16 bp, synthetic construct
  misc_feature 1..16: note = Synthetic oligonucleotide
  source 1..16: mol_type = other DNA
ctaccatgcaaaggag

SEQ ID NO: 628 - DNA, 16 bp, synthetic construct
  misc_feature 1..16: note = Synthetic oligonucleotide
  source 1..16: mol_type = other DNA
tgcattctcccttata

SEQ ID NO: 629 - DNA, 16 bp, synthetic construct
  misc_feature 1..16: note = Synthetic oligonucleotide
  source 1..16: mol_type = other DNA
agacagcgagagtcac

SEQ ID NO: 630 - DNA, 16 bp, synthetic construct
  misc_feature 1..16: note = Synthetic oligonucleotide
  source 1..16: mol_type = other DNA
aattgtttcttgccgt

SEQ ID NO: 631 - DNA, 16 bp, synthetic construct
  misc_feature 1..16: note = Synthetic oligonucleotide
  source 1..16: mol_type = other DNA
gattactcctgaagtc

SEQ ID NO: 632 - DNA, 16 bp, synthetic construct
  misc_feature 1..16: note = Synthetic oligonucleotide
  source 1..16: mol_type = other DNA
ataatggtaggtctac

SEQ ID NO: 633 - DNA, 16 bp, synthetic construct
  misc_feature 1..16: note = Synthetic oligonucleotide
  source 1..16: mol_type = other DNA
atattcctgaccattc

SEQ ID NO: 634 - DNA, 16 bp, synthetic construct
  misc_feature 1..16: note = Synthetic oligonucleotide
  source 1..16: mol_type = other DNA
gaatccagatgtgttt

SEQ ID NO: 635 - DNA, 16 bp, synthetic construct
  misc_feature 1..16: note = Synthetic oligonucleotide
  source 1..16: mol_type = other DNA
atcaacacatcattgg

SEQ ID NO: 636 - DNA, 16 bp, synthetic construct
  misc_feature 1..16: note = Synthetic oligonucleotide
  source 1..16: mol_type = other DNA
agtgatcacttccatc

SEQ ID NO: 637 - DNA, 16 bp, synthetic construct
  misc_feature 1..16: note = Synthetic oligonucleotide
  source 1..16: mol_type = other DNA
gccatggtgctttgga

SEQ ID NO: 638 - DNA, 16 bp, synthetic construct
  misc_feature 1..16: note = Synthetic oligonucleotide
  source 1..16: mol_type = other DNA
cttccataagccagca

SEQ ID NO: 639 - DNA, 16 bp, synthetic construct
  misc_feature 1..16: note = Synthetic oligonucleotide
  source 1..16: mol_type = other DNA
tagggctctaattcta

SEQ ID NO: 640 - DNA, 16 bp, synthetic construct
  misc_feature 1..16: note = Synthetic oligonucleotide
  source 1..16: mol_type = other DNA
gagggaattgtgtgcc

SEQ ID NO: 641 - DNA, 16 bp, synthetic construct
  misc_feature 1..16: note = Synthetic oligonucleotide
  source 1..16: mol_type = other DNA
tgtgatgtgggacttg

SEQ ID NO: 642 - DNA, 16 bp, synthetic construct
  misc_feature 1..16: note = Synthetic oligonucleotide
  source 1..16: mol_type = other DNA
aagtgtgggagtgcat

SEQ ID NO: 643 - DNA, 16 bp, synthetic construct
  misc_feature 1..16: note = Synthetic oligonucleotide
  source 1..16: mol_type = other DNA
aggtcctccagtcccc

SEQ ID NO: 644 - DNA, 16 bp, synthetic construct
  misc_feature 1..16: note = Synthetic oligonucleotide
  source 1..16: mol_type = other DNA
gtcgctgcagggcctc

SEQ ID NO: 645 - DNA, 16 bp, synthetic construct
  misc_feature 1..16: note = Synthetic oligonucleotide
  source 1..16: mol_type = other DNA
tttgttgcaccctcgc

SEQ ID NO: 646 - DNA, 16 bp, synthetic construct
  misc_feature 1..16: note = Synthetic oligonucleotide
  source 1..16: mol_type = other DNA
gctctctgggtccatg

SEQ ID NO: 647 - DNA, 16 bp, synthetic construct
  misc_feature 1..16: note = Synthetic oligonucleotide
  source 1..16: mol_type = other DNA
cagtttctgtactgct

SEQ ID NO: 648 - DNA, 16 bp, synthetic construct
  misc_feature 1..16: note = Synthetic oligonucleotide
  source 1..16: mol_type = other DNA
gcaagggcacggagcc

SEQ ID NO: 649 - DNA, 16 bp, synthetic construct
  misc_feature 1..16: note = Synthetic oligonucleotide
  source 1..16: mol_type = other DNA
tggcgatggtggtgcc

SEQ ID NO: 650 - DNA, 16 bp, synthetic construct
  misc_feature 1..16: note = Synthetic oligonucleotide
  source 1..16: mol_type = other DNA
cctctgtgaagggtgc

SEQ ID NO: 651 - DNA, 16 bp, synthetic construct
  misc_feature 1..16: note = Synthetic oligonucleotide
  source 1..16: mol_type = other DNA
taatcccggtcaaagc

SEQ ID NO: 652 - DNA, 16 bp, synthetic construct
  misc_feature 1..16: note = Synthetic oligonucleotide
  source 1..16: mol_type = other DNA
tgtccaccacttcttt

SEQ ID NO: 653 - DNA, 16 bp, synthetic construct
  misc_feature 1..16: note = Synthetic oligonucleotide
  source 1..16: mol_type = other DNA
tattgccagctaagga

SEQ ID NO: 654 - DNA, 16 bp, synthetic construct
  misc_feature 1..16: note = Synthetic oligonucleotide
  source 1..16: mol_type = other DNA
agattggctctggctc

SEQ ID NO: 655 - DNA, 16 bp, synthetic construct
  misc_feature 1..16: note = Synthetic oligonucleotide
  source 1..16: mol_type = other DNA
cgctttcagctgagat

SEQ ID NO: 656 - DNA, 16 bp, synthetic construct
  misc_feature 1..16: note = Synthetic oligonucleotide
  source 1..16: mol_type = other DNA
gcttgactcctctgct

SEQ ID NO: 657 - DNA, 16 bp, synthetic construct
  misc_feature 1..16: note = Synthetic oligonucleotide
  source 1..16: mol_type = other DNA
ccccctcatgtaagtg

SEQ ID NO: 658 - DNA, 16 bp, synthetic construct
  misc_feature 1..16: note = Synthetic oligonucleotide
  source 1..16: mol_type = other DNA
atctctcctggtggct

SEQ ID NO: 659 - DNA, 16 bp, synthetic construct
  misc_feature 1..16: note = Synthetic oligonucleotide
  source 1..16: mol_type = other DNA
taaactttacctcacc

SEQ ID NO: 660 - DNA, 16 bp, synthetic construct
  misc_feature 1..16: note = Synthetic oligonucleotide
  source 1..16: mol_type = other DNA
ttctccttgctgcact

SEQ ID NO: 661 - DNA, 16 bp, synthetic construct
  misc_feature 1..16: note = Synthetic oligonucleotide
  source 1..16: mol_type = other DNA
acccggccccccaata

SEQ ID NO: 662 - DNA, 16 bp, synthetic construct
  misc_feature 1..16: note = Synthetic oligonucleotide
  source 1..16: mol_type = other DNA
tccaactgttctaact

SEQ ID NO: 663 - DNA, 16 bp, synthetic construct
  misc_feature 1..16: note = Synthetic oligonucleotide
  source 1..16: mol_type = other DNA
tatgcccccaggagga

SEQ ID NO: 664 - DNA, 16 bp, synthetic construct
  misc_feature 1..16: note = Synthetic oligonucleotide
  source 1..16: mol_type = other DNA
ccccaatgaccatcat

SEQ ID NO: 665 - DNA, 16 bp, synthetic construct
  misc_feature 1..16: note = Synthetic oligonucleotide
  source 1..16: mol_type = other DNA
ggttctcacatactct

SEQ ID NO: 666 - DNA, 16 bp, synthetic construct
  misc_feature 1..16: note = Synthetic oligonucleotide
  source 1..16: mol_type = other DNA
tagagatctgagcttc

SEQ ID NO: 667 - DNA, 16 bp, synthetic construct
  misc_feature 1..16: note = Synthetic oligonucleotide
  source 1..16: mol_type = other DNA
agcttgatgagtaggt

SEQ ID NO: 668 - DNA, 16 bp, synthetic construct
  misc_feature 1..16: note = Synthetic oligonucleotide
  source 1..16: mol_type = other DNA
gcctcctccttgagca

SEQ ID NO: 669 - DNA, 16 bp, synthetic construct
  misc_feature 1..16: note = Synthetic oligonucleotide
  source 1..16: mol_type = other DNA
gatgacctctgaactc

SEQ ID NO: 670 - DNA, 16 bp, synthetic construct
  misc_feature 1..16: note = Synthetic oligonucleotide
  source 1..16: mol_type = other DNA
ggtcctccctgggcga

SEQ ID NO: 671 - DNA, 16 bp, synthetic construct
  misc_feature 1..16: note = Synthetic oligonucleotide
  source 1..16: mol_type = other DNA
gcccacatttgagatt

SEQ ID NO: 672 - DNA, 16 bp, synthetic construct
  misc_feature 1..16: note = Synthetic oligonucleotide
  source 1..16: mol_type = other DNA
aggacgggcagccatc

SEQ ID NO: 673 - DNA, 16 bp, synthetic construct
  misc_feature 1..16: note = Synthetic oligonucleotide
  source 1..16: mol_type = other DNA
ccaccctccattctaa

SEQ ID NO: 674 - DNA, 16 bp, synthetic construct
  misc_feature 1..16: note = Synthetic oligonucleotide
  source 1..16: mol_type = other DNA
ccacttgagtcatttg

SEQ ID NO: 675 - DNA, 16 bp, synthetic construct
  misc_feature 1..16: note = Synthetic oligonucleotide
  source 1..16: mol_type = other DNA
gagcgggaggtgacag

SEQ ID NO: 676 - DNA, 16 bp, synthetic construct
  misc_feature 1..16: note = Synthetic oligonucleotide
  source 1..16: mol_type = other DNA
caggcccgatacattc

SEQ ID NO: 677 - DNA, 16 bp, synthetic construct
  misc_feature 1..16: note = Synthetic oligonucleotide
  source 1..16: mol_type = other DNA
attctcatggtacagg

SEQ ID NO: 678 - DNA, 16 bp, synthetic construct
  misc_feature 1..16: note = Synthetic oligonucleotide
  source 1..16: mol_type = other DNA
cttagggaggccctat

SEQ ID NO: 679 - DNA, 16 bp, synthetic construct
  misc_feature 1..16: note = Synthetic oligonucleotide
  source 1..16: mol_type = other DNA
aaattctattgggcct

SEQ ID NO: 680 - DNA, 16 bp, synthetic construct
  misc_feature 1..16: note = Synthetic oligonucleotide
  source 1..16: mol_type = other DNA
ttcaccatagcacgaa

SEQ ID NO: 681 - DNA, 16 bp, synthetic construct
  misc_feature 1..16: note = Synthetic oligonucleotide
  source 1..16: mol_type = other DNA
ccttactgcagtttca

SEQ ID NO: 682 - DNA, 16 bp, synthetic construct
  misc_feature 1..16: note = Synthetic oligonucleotide
  source 1..16: mol_type = other DNA
gggattttccaacaag

SEQ ID NO: 683 - DNA, 16 bp, synthetic construct
  misc_feature 1..16: note = Synthetic oligonucleotide
  source 1..16: mol_type = other DNA
tctcacctgtattcgg

SEQ ID NO: 684 - DNA, 16 bp, synthetic construct
  misc_feature 1..16: note = Synthetic oligonucleotide
  source 1..16: mol_type = other DNA
tgcactaaaagctgat

SEQ ID NO: 685 - DNA, 16 bp, synthetic construct
  misc_feature 1..16: note = Synthetic oligonucleotide
  source 1..16: mol_type = other DNA
cagaaatccttatgct

SEQ ID NO: 686 - DNA, 16 bp, synthetic construct
  misc_feature 1..16: note = Synthetic oligonucleotide
  source 1..16: mol_type = other DNA
tccatgtatgcccatg

SEQ ID NO: 687 - DNA, 16 bp, synthetic construct
  misc_feature 1..16: note = Synthetic oligonucleotide
  source 1..16: mol_type = other DNA
cactcaatcataccct

SEQ ID NO: 688 - DNA, 16 bp, synthetic construct
  misc_feature 1..16: note = Synthetic oligonucleotide
  source 1..16: mol_type = other DNA
caattcagctaagacc

SEQ ID NO: 689 - DNA, 16 bp, synthetic construct
  misc_feature 1..16: note = Synthetic oligonucleotide
  source 1..16: mol_type = other DNA
ggagttgctgaaacca

SEQ ID NO: 690 - DNA, 16 bp, synthetic construct
  misc_feature 1..16: note = Synthetic oligonucleotide
  source 1..16: mol_type = other DNA
catatcagatgggtac

SEQ ID NO: 691 - DNA, 16 bp, synthetic construct
  misc_feature 1..16: note = Synthetic oligonucleotide
  source 1..16: mol_type = other DNA
acgaggcctttagaac

SEQ ID NO: 692 - DNA, 16 bp, synthetic construct
  misc_feature 1..16: note = Synthetic oligonucleotide
  source 1..16: mol_type = other DNA
ctctggcactaaatct

SEQ ID NO: 693 - DNA, 16 bp, synthetic construct
  misc_feature 1..16: note = Synthetic oligonucleotide
  source 1..16: mol_type = other DNA
ggctgggcgagcgatt

SEQ ID NO: 694 - DNA, 16 bp, synthetic construct
  misc_feature 1..16: note = Synthetic oligonucleotide
  source 1..16: mol_type = other DNA
tgacttggttgccgtg

SEQ ID NO: 695 - DNA, 16 bp, synthetic construct
  misc_feature 1..16: note = Synthetic oligonucleotide
  source 1..16: mol_type = other DNA
ggcctgttattaaacc

SEQ ID NO: 696 - DNA, 16 bp, synthetic construct
  misc_feature 1..16: note = Synthetic oligonucleotide
  source 1..16: mol_type = other DNA
gatccttgaggcacct

SEQ ID NO: 697 - DNA, 16 bp, synthetic construct
  misc_feature 1..16: note = Synthetic oligonucleotide
  source 1..16: mol_type = other DNA
actaccatgcaaagga

SEQ ID NO: 698 - DNA, 16 bp, synthetic construct
  misc_feature 1..16: note = Synthetic oligonucleotide
  source 1..16: mol_type = other DNA
ctccttatgttttgaa

SEQ ID NO: 699 - DNA, 16 bp, synthetic construct
  misc_feature 1..16: note = Synthetic oligonucleotide
  source 1..16: mol_type = other DNA
cagacagcgagagtca

SEQ ID NO: 700 - DNA, 16 bp, synthetic construct
  misc_feature 1..16: note = Synthetic oligonucleotide
  source 1..16: mol_type = other DNA
aaattgtttcttgccg

SEQ ID NO: 701 - DNA, 16 bp, synthetic construct
  misc_feature 1..16: note = Synthetic oligonucleotide
  source 1..16: mol_type = other DNA
ggattactcctgaagt

SEQ ID NO: 702 - DNA, 16 bp, synthetic construct
  misc_feature 1..16: note = Synthetic oligonucleotide
  source 1..16: mol_type = other DNA
aataatggtaggtcta

SEQ ID NO: 703 - DNA, 16 bp, synthetic construct
  misc_feature 1..16: note = Synthetic oligonucleotide
  source 1..16: mol_type = other DNA
tatattcctgaccatt

SEQ ID NO: 704 - DNA, 16 bp, synthetic construct
  misc_feature 1..16: note = Synthetic oligonucleotide
  source 1..16: mol_type = other DNA
ggaatccagatgtgtt

SEQ ID NO: 705 - DNA, 16 bp, synthetic construct
  misc_feature 1..16: note = Synthetic oligonucleotide
  source 1..16: mol_type = other DNA
tatcaacacatcattg

SEQ ID NO: 706 - DNA, 16 bp, synthetic construct
  misc_feature 1..16: note = Synthetic oligonucleotide
  source 1..16: mol_type = other DNA
cagtgatcacttccat

SEQ ID NO: 707 - DNA, 16 bp, synthetic construct
  misc_feature 1..16: note = Synthetic oligonucleotide
  source 1..16: mol_type = other DNA
acattgaaacaccagg

SEQ ID NO: 708 - DNA, 16 bp, synthetic construct
  misc_feature 1..16: note = Synthetic oligonucleotide
  source 1..16: mol_type = other DNA
gcttccataagccagc

SEQ ID NO: 709 - DNA, 16 bp, synthetic construct
  misc_feature 1..16: note = Synthetic oligonucleotide
  source 1..16: mol_type = other DNA
gtagggctctaattct

SEQ ID NO: 710 - DNA, 16 bp, synthetic construct
  misc_feature 1..16: note = Synthetic oligonucleotide
  source 1..16: mol_type = other DNA
agagggaattgtgtgc

SEQ ID NO: 711 - DNA, 16 bp, synthetic construct
  misc_feature 1..16: note = Synthetic oligonucleotide
  source 1..16: mol_type = other DNA
ctgtgatgtgggactt

SEQ ID NO: 712 - DNA, 16 bp, synthetic construct
  misc_feature 1..16: note = Synthetic oligonucleotide
  source 1..16: mol_type = other DNA
aaagtgtgggagtgca

SEQ ID NO: 713 - DNA, 16 bp, synthetic construct
  misc_feature 1..16: note = Synthetic oligonucleotide
  source 1..16: mol_type = other DNA
aggaattcgaaaggga

SEQ ID NO: 714 - DNA, 16 bp, synthetic construct
  misc_feature 1..16: note = Synthetic oligonucleotide
  source 1..16: mol_type = other DNA
ataataaccagacagg

SEQ ID NO: 715 - DNA, 16 bp, synthetic construct
  misc_feature 1..16: note = Synthetic oligonucleotide
  source 1..16: mol_type = other DNA
gcactcatccagatgc

SEQ ID NO: 716 - DNA, 16 bp, synthetic construct
  misc_feature 1..16: note = Synthetic oligonucleotide
  source 1..16: mol_type = other DNA
tccagtatctgtccca

SEQ ID NO: 717 - DNA, 16 bp, synthetic construct
  misc_feature 1..16: note = Synthetic oligonucleotide
  source 1..16: mol_type = other DNA
gtgtgctcactttttc

SEQ ID NO: 718 - DNA, 16 bp, synthetic construct
  misc_feature 1..16: note = Synthetic oligonucleotide
  source 1..16: mol_type = other DNA
gttatcctcaagctca

SEQ ID NO: 719 - DNA, 16 bp, synthetic construct
  misc_feature 1..16: note = Synthetic oligonucleotide
  source 1..16: mol_type = other DNA
accttctgaaccccat

SEQ ID NO: 720 - DNA, 16 bp, synthetic construct
  misc_feature 1..16: note = Synthetic oligonucleotide
  source 1..16: mol_type = other DNA
gacgagggtcaggatg

SEQ ID NO: 721 - DNA, 16 bp, synthetic construct
  misc_feature 1..16: note = Synthetic oligonucleotide
  source 1..16: mol_type = other DNA
catcccaggttccaag

SEQ ID NO: 722 - DNA, 16 bp, synthetic construct
  misc_feature 1..16: note = Synthetic oligonucleotide
  source 1..16: mol_type = other DNA
atggtactgctggtaa

SEQ ID NO: 723 - DNA, 16 bp, synthetic construct
  misc_feature 1..16: note = Synthetic oligonucleotide
  source 1..16: mol_type = other DNA
ggcttgggcttgtgtc

SEQ ID NO: 724 - DNA, 16 bp, synthetic construct
  misc_feature 1..16: note = Synthetic oligonucleotide
  source 1..16: mol_type = other DNA
gtgtgagttggtaagt

SEQ ID NO: 725 - DNA, 16 bp, synthetic construct
  misc_feature 1..16: note = Synthetic oligonucleotide
  source 1..16: mol_type = other DNA
atgcggtactgactga

SEQ ID NO: 726 - DNA, 16 bp, synthetic construct
  misc_feature 1..16: note = Synthetic oligonucleotide
  source 1..16: mol_type = other DNA
cacctgttcaccgctt

SEQ ID NO: 727 - DNA, 16 bp, synthetic construct
  misc_feature 1..16: note = Synthetic oligonucleotide
  source 1..16: mol_type = other DNA
gccacatccgtgagct

SEQ ID NO: 728 - DNA, 16 bp, synthetic construct
  misc_feature 1..16: note = Synthetic oligonucleotide
  source 1..16: mol_type = other DNA
cctgcagaatcttata

SEQ ID NO: 729 - DNA, 16 bp, synthetic construct
  misc_feature 1..16: note = Synthetic oligonucleotide
  source 1..16: mol_type = other DNA
ccctgccaggcatatc

SEQ ID NO: 730 - DNA, 16 bp, synthetic construct
  misc_feature 1..16: note = Synthetic oligonucleotide
  source 1..16: mol_type = other DNA
ccaaagtccctaacac

SEQ ID NO: 731 - DNA, 16 bp, synthetic construct
  misc_feature 1..16: note = Synthetic oligonucleotide
  source 1..16: mol_type = other DNA
tattgcaggctccaat

SEQ ID NO: 732 - DNA, 16 bp, synthetic construct
  misc_feature 1..16: note = Synthetic oligonucleotide
  source 1..16: mol_type = other DNA
tcttccgtcaatatat

SEQ ID NO: 733 - DNA, 16 bp, synthetic construct
  misc_feature 1..16: note = Synthetic oligonucleotide
  source 1..16: mol_type = other DNA
tgggtctgtagtggag

SEQ ID NO: 734 - DNA, 16 bp, synthetic construct
  misc_feature 1..16: note = Synthetic oligonucleotide
  source 1..16: mol_type = other DNA
tgcctgactgagatat

SEQ ID NO: 735 - DNA, 16 bp, synthetic construct
  misc_feature 1..16: note = Synthetic oligonucleotide
  source 1..16: mol_type = other DNA
ccatcacatgacaacc

SEQ ID NO: 736 - DNA, 16 bp, synthetic construct
  misc_feature 1..16: note = Synthetic oligonucleotide
  source 1..16: mol_type = other DNA
ccgggtaagagcgatg

SEQ ID NO: 737 - DNA, 16 bp, synthetic construct
  misc_feature 1..16: note = Synthetic oligonucleotide
  source 1..16: mol_type = other DNA
cggcgacaagacagct

SEQ ID NO: 738 - DNA, 16 bp, synthetic construct
  misc_feature 1..16: note = Synthetic oligonucleotide
  source 1..16: mol_type = other DNA
agcaaacacgctcccc

SEQ ID NO: 739 - DNA, 16 bp, synthetic construct
  misc_feature 1..16: note = Synthetic oligonucleotide
  source 1..16: mol_type = other DNA
gcaacgcacccttctc

SEQ ID NO: 740 - DNA, 16 bp, synthetic construct
  misc_feature 1..16: note = Synthetic oligonucleotide
  source 1..16: mol_type = other DNA
acaggcttcatcatct

SEQ ID NO: 741 - DNA, 16 bp, synthetic construct
  misc_feature 1..16: note = Synthetic oligonucleotide
  source 1..16: mol_type = other DNA
agcctctgctgaatat

SEQ ID NO: 742 - DNA, 16 bp, synthetic construct
  misc_feature 1..16: note = Synthetic oligonucleotide
  source 1..16: mol_type = other DNA
gatcttgccagatgcc

SEQ ID NO: 743 - DNA, 16 bp, synthetic construct
  misc_feature 1..16: note = Synthetic oligonucleotide
  source 1..16: mol_type = other DNA
atcactgagcccccat

SEQ ID NO: 744 - DNA, 16 bp, synthetic construct
  misc_feature 1..16: note = Synthetic oligonucleotide
  source 1..16: mol_type = other DNA
tcaccctaaggagagg

SEQ ID NO: 745 - DNA, 16 bp, synthetic construct
  misc_feature 1..16: note = Synthetic oligonucleotide
  source 1..16: mol_type = other DNA
acttccccaaggatgt

SEQ ID NO: 746 - DNA, 16 bp, synthetic construct
  misc_feature 1..16: note = Synthetic oligonucleotide
  source 1..16: mol_type = other DNA
agggtcagcttggagc

SEQ ID NO: 747 - DNA, 16 bp, synthetic construct
  misc_feature 1..16: note = Synthetic oligonucleotide
  source 1..16: mol_type = other DNA
gttaagctggaagctg

SEQ ID NO: 748 - DNA, 16 bp, synthetic construct
  misc_feature 1..16: note = Synthetic oligonucleotide
  source 1..16: mol_type = other DNA
agccgtgttatatttg

SEQ ID NO: 749 - DNA, 16 bp, synthetic construct
  misc_feature 1..16: note = Synthetic oligonucleotide
  source 1..16: mol_type = other DNA
tgccctaacacagctg

SEQ ID NO: 750 - DNA, 16 bp, synthetic construct
  misc_feature 1..16: note = Synthetic oligonucleotide
  source 1..16: mol_type = other DNA
ttcccaattcagcaat

SEQ ID NO: 751 - DNA, 16 bp, synthetic construct
  misc_feature 1..16: note = Synthetic oligonucleotide
  source 1..16: mol_type = other DNA
ttgtctccgacacttt

SEQ ID NO: 752 - DNA, 16 bp, synthetic construct
  misc_feature 1..16: note = Synthetic oligonucleotide
  source 1..16: mol_type = other DNA
aagtgcaaccaatcaa

SEQ ID NO: 753 - DNA, 16 bp, synthetic construct
  misc_feature 1..16: note = Synthetic oligonucleotide
  source 1..16: mol_type = other DNA
ctaaactcacactggc

SEQ ID NO: 754 - DNA, 16 bp, synthetic construct
  misc_feature 1..16: note = Synthetic oligonucleotide
  source 1..16: mol_type = other DNA
ctaagttccggtctca

SEQ ID NO: 755 - DNA, 16 bp, synthetic construct
  misc_feature 1..16: note = Synthetic oligonucleotide
  source 1..16: mol_type = other DNA
actccactgggcccga

SEQ ID NO: 756 - DNA, 16 bp, synthetic construct
  misc_feature 1..16: note = Synthetic oligonucleotide
  source 1..16: mol_type = other DNA
gcattgccctcccaat

SEQ ID NO: 757 - DNA, 16 bp, synthetic construct
  misc_feature 1..16: note = Synthetic oligonucleotide
  source 1..16: mol_type = other DNA
caccacagccgttcca

SEQ ID NO: 758 - DNA, 16 bp, synthetic construct
  misc_feature 1..16: note = Synthetic oligonucleotide
  source 1..16: mol_type = other DNA
ctgggtctgacccacg

SEQ ID NO: 759 - DNA, 16 bp, synthetic construct
  misc_feature 1..16: note = Synthetic oligonucleotide
  source 1..16: mol_type = other DNA
caggatcctgacaaac

SEQ ID NO: 760 - DNA, 16 bp, synthetic construct
  misc_feature 1..16: note = Synthetic oligonucleotide
  source 1..16: mol_type = other DNA
caggttcacatgacag

SEQ ID NO: 761 - DNA, 16 bp, synthetic construct
  misc_feature 1..16: note = Synthetic oligonucleotide
  source 1..16: mol_type = other DNA
aactgcaagctatggg

SEQ ID NO: 762 - DNA, 16 bp, synthetic construct
  misc_feature 1..16: note = Synthetic oligonucleotide
  source 1..16: mol_type = other DNA
gacaggcaatacctac

SEQ ID NO: 763 - DNA, 16 bp, synthetic construct
  misc_feature 1..16: note = Synthetic oligonucleotide
  source 1..16: mol_type = other DNA
ggatggaaggaacctc

SEQ ID NO: 764 - DNA, 16 bp, synthetic construct
  misc_feature 1..16: note = Synthetic oligonucleotide
  source 1..16: mol_type = other DNA
tgaacgcaatgctgac

SEQ ID NO: 765 - DNA, 16 bp, synthetic construct
  misc_feature 1..16: note = Synthetic oligonucleotide
  source 1..16: mol_type = other DNA
gctctcggcttctaat

SEQ ID NO: 766 - DNA, 16 bp, synthetic construct
  misc_feature 1..16: note = Synthetic oligonucleotide
  source 1..16: mol_type = other DNA
cggctctccactgtca

SEQ ID NO: 767 - DNA, 16 bp, synthetic construct
  misc_feature 1..16: note = Synthetic oligonucleotide
  source 1..16: mol_type = other DNA
gcactctcagatgggc

SEQ ID NO: 768 - DNA, 16 bp, synthetic construct
  misc_feature 1..16: note = Synthetic oligonucleotide
  source 1..16: mol_type = other DNA
acagcattgagtacaa

SEQ ID NO: 769 - DNA, 16 bp, synthetic construct
  misc_feature 1..16: note = Synthetic oligonucleotide
  source 1..16: mol_type = other DNA
atcaagcaggaagctc

SEQ ID NO: 770 - DNA, 16 bp, synthetic construct
  misc_feature 1..16: note = Synthetic oligonucleotide
  source 1..16: mol_type = other DNA
ccggccacctcattct

SEQ ID NO: 771 - DNA, 16 bp, synthetic construct
  misc_feature 1..16: note = Synthetic oligonucleotide
  source 1..16: mol_type = other DNA
ccagtatgtatttgtg

SEQ ID NO: 772 - DNA, 16 bp, synthetic construct
  misc_feature 1..16: note = Synthetic oligonucleotide
  source 1..16: mol_type = other DNA
cagtacagagcaggat

SEQ ID NO: 773 - DNA, 16 bp, synthetic construct
  misc_feature 1..16: note = Synthetic oligonucleotide
  source 1..16: mol_type = other DNA
cacatgtttcaacagt

SEQ ID NO: 774 - DNA, 16 bp, synthetic construct
  misc_feature 1..16: note = Synthetic oligonucleotide
  source 1..16: mol_type = other DNA
tttagaaaggacacgg

SEQ ID NO: 775 - DNA, 16 bp, synthetic construct
  misc_feature 1..16: note = Synthetic oligonucleotide
  source 1..16: mol_type = other DNA
aatatcagagtgtacc

SEQ ID NO: 776 - DNA, 16 bp, synthetic construct
  misc_feature 1..16: note = Synthetic oligonucleotide
  source 1..16: mol_type = other DNA
tcaaacactttatacc

SEQ ID NO: 777 - DNA, 16 bp, synthetic construct
  misc_feature 1..16: note = Synthetic oligonucleotide
  source 1..16: mol_type = other DNA
ggaagtggaaacatcc

SEQ ID NO: 778 - DNA, 16 bp, synthetic construct
  misc_feature 1..16: note = Synthetic oligonucleotide
  source 1..16: mol_type = other DNA
gttgaagtcacccagc

SEQ ID NO: 779 - DNA, 16 bp, synthetic construct
  misc_feature 1..16: note = Synthetic oligonucleotide
  source 1..16: mol_type = other DNA
gactgtgtgagcacac

SEQ ID NO: 780 - DNA, 16 bp, synthetic construct
  misc_feature 1..16: note = Synthetic oligonucleotide
  source 1..16: mol_type = other DNA
catttggagatctggc

SEQ ID NO: 781 - DNA, 16 bp, synthetic construct
  misc_feature 1..16: note = Synthetic oligonucleotide
  source 1..16: mol_type = other DNA
attagtgctatagagg

SEQ ID NO: 782 - DNA, 16 bp, synthetic construct
  misc_feature 1..16: note = Synthetic oligonucleotide
  source 1..16: mol_type = other DNA
ttgcataagagatgac

SEQ ID NO: 783 - DNA, 16 bp, synthetic construct
  misc_feature 1..16: note = Synthetic oligonucleotide
  source 1..16: mol_type = other DNA
gaggaattcgaaaggg

SEQ ID NO: 784 - DNA, 16 bp, synthetic construct
  misc_feature 1..16: note = Synthetic oligonucleotide
  source 1..16: mol_type = other DNA
gtataataaccagaca

SEQ ID NO: 785 - DNA, 16 bp, synthetic construct
  misc_feature 1..16: note = Synthetic oligonucleotide
  source 1..16: mol_type = other DNA
tgcactcatccagatg

SEQ ID NO: 786 - DNA, 16 bp, synthetic construct
  misc_feature 1..16: note = Synthetic oligonucleotide
  source 1..16: mol_type = other DNA
ctccagtatctgtccc

SEQ ID NO: 787 - DNA, 16 bp, synthetic construct
  misc_feature 1..16: note = Synthetic oligonucleotide
  source 1..16: mol_type = other DNA
ggaccttctgaacccc

SEQ ID NO: 788 - DNA, 16 bp, synthetic construct
  misc_feature 1..16: note = Synthetic oligonucleotide
  source 1..16: mol_type = other DNA
cgacgagggtcaggat

SEQ ID NO: 789 - DNA, 16 bp, synthetic construct
  misc_feature 1..16: note = Synthetic oligonucleotide
  source 1..16: mol_type = other DNA
ccatcccaggttccaa

SEQ ID NO: 790 - DNA, 16 bp, synthetic construct
  misc_feature 1..16: note = Synthetic oligonucleotide
  source 1..16: mol_type = other DNA
catggtactgctggta

SEQ ID NO: 791 - DNA, 16 bp, synthetic construct
  misc_feature 1..16: note = Synthetic oligonucleotide
  source 1..16: mol_type = other DNA
tttgatgaccaggtcg

SEQ ID NO: 792 - DNA, 16 bp, synthetic construct
  misc_feature 1..16: note = Synthetic oligonucleotide
  source 1..16: mol_type = other DNA
cgtgtgagttggtaag

SEQ ID NO: 793 - DNA, 16 bp, synthetic construct
  misc_feature 1..16: note = Synthetic oligonucleotide
  source 1..16: mol_type = other DNA
catgcggtactgactg

SEQ ID NO: 794 - DNA, 16 bp, synthetic construct
  misc_feature 1..16: note = Synthetic oligonucleotide
  source 1..16: mol_type = other DNA
ccacctgttcaccgct

SEQ ID NO: 795 - DNA, 16 bp, synthetic construct
  misc_feature 1..16: note = Synthetic oligonucleotide
  source 1..16: mol_type = other DNA
gggccacatccgtgag

SEQ ID NO: 796 - DNA, 16 bp, synthetic construct
  misc_feature 1..16: note = Synthetic oligonucleotide
  source 1..16: mol_type = other DNA
gccaaagtccctaaca

SEQ ID NO: 797 - DNA, 16 bp, synthetic construct
  misc_feature 1..16: note = Synthetic oligonucleotide
  source 1..16: mol_type = other DNA
ttcttccgtcaatata

SEQ ID NO: 798 - DNA, 16 bp, synthetic construct
  misc_feature 1..16: note = Synthetic oligonucleotide
  source 1..16: mol_type = other DNA
gctgggtctgtagtgg

SEQ ID NO: 799 - DNA, 16 bp, synthetic construct
  misc_feature 1..16: note = Synthetic oligonucleotide
  source 1..16: mol_type = other DNA
ctgcctgactgagata

SEQ ID NO: 800 - DNA, 16 bp, synthetic construct
  misc_feature 1..16: note = Synthetic oligonucleotide
  source 1..16: mol_type = other DNA
cccatcacatgacaac

SEQ ID NO: 801 - DNA, 16 bp, synthetic construct
  misc_feature 1..16: note = Synthetic oligonucleotide
  source 1..16: mol_type = other DNA
accgggtaagagcgat

SEQ ID NO: 802 - DNA, 16 bp, synthetic construct
  misc_feature 1..16: note = Synthetic oligonucleotide
  source 1..16: mol_type = other DNA
gcggcgacaagacagc

SEQ ID NO: 803 - DNA, 16 bp, synthetic construct
  misc_feature 1..16: note = Synthetic oligonucleotide
  source 1..16: mol_type = other DNA
tctgcaacgcaccctt

SEQ ID NO: 804 - DNA, 16 bp, synthetic construct
  misc_feature 1..16: note = Synthetic oligonucleotide
  source 1..16: mol_type = other DNA
ttaccaaggaatcttc

SEQ ID NO: 805 - DNA, 16 bp, synthetic construct
  misc_feature 1..16: note = Synthetic oligonucleotide
  source 1..16: mol_type = other DNA
cgcctccttcaacctt

SEQ ID NO: 806 - DNA, 16 bp, synthetic construct
  misc_feature 1..16: note = Synthetic oligonucleotide
  source 1..16: mol_type = other DNA
gaccctgacctggagc

SEQ ID NO: 807 - DNA, 16 bp, synthetic construct
  misc_feature 1..16: note = Synthetic oligonucleotide
  source 1..16: mol_type = other DNA
gcactggacagcctgt

SEQ ID NO: 808 - DNA, 16 bp, synthetic construct
  misc_feature 1..16: note = Synthetic oligonucleotide
  source 1..16: mol_type = other DNA
ttgtctatcactgagc

SEQ ID NO: 809 - DNA, 16 bp, synthetic construct
  misc_feature 1..16: note = Synthetic oligonucleotide
  source 1..16: mol_type = other DNA
gtcaccctaaggagag

SEQ ID NO: 810 - DNA, 16 bp, synthetic construct
  misc_feature 1..16: note = Synthetic oligonucleotide
  source 1..16: mol_type = other DNA
gctgattccacttccc

SEQ ID NO: 811 - DNA, 16 bp, synthetic construct
  misc_feature 1..16: note = Synthetic oligonucleotide
  source 1..16: mol_type = other DNA
ccccagggtcagcttg

SEQ ID NO: 812 - DNA, 16 bp, synthetic construct
  misc_feature 1..16: note = Synthetic oligonucleotide
  source 1..16: mol_type = other DNA
agttaagctggaagct

SEQ ID NO: 813 - DNA, 16 bp, synthetic construct
  misc_feature 1..16: note = Synthetic oligonucleotide
  source 1..16: mol_type = other DNA
tagccgtgttatattt

SEQ ID NO: 814 - DNA, 16 bp, synthetic construct
  misc_feature 1..16: note = Synthetic oligonucleotide
  source 1..16: mol_type = other DNA
tgaactcagcccctgc

SEQ ID NO: 815 - DNA, 16 bp, synthetic construct
  misc_feature 1..16: note = Synthetic oligonucleotide
  source 1..16: mol_type = other DNA
tttcccaattcagcaa

SEQ ID NO: 816 - DNA, 16 bp, synthetic construct
  misc_feature 1..16: note = Synthetic oligonucleotide
  source 1..16: mol_type = other DNA
cttgtctccgacactt

SEQ ID NO: 817 - DNA, 16 bp, synthetic construct
  misc_feature 1..16: note = Synthetic oligonucleotide
  source 1..16: mol_type = other DNA
taagtgcaaccaatca

SEQ ID NO: 818 - DNA, 16 bp, synthetic construct
  misc_feature 1..16: note = Synthetic oligonucleotide
  source 1..16: mol_type = other DNA
cctaaactcacactgg

SEQ ID NO: 819 - DNA, 16 bp, synthetic construct
  misc_feature 1..16: note = Synthetic oligonucleotide
  source 1..16: mol_type = other DNA
gctaagttccggtctc

SEQ ID NO: 820 - DNA, 16 bp, synthetic construct
  misc_feature 1..16: note = Synthetic oligonucleotide
  source 1..16: mol_type = other DNA
aactccactgggcccg

SEQ ID NO: 821 - DNA, 16 bp, synthetic construct
  misc_feature 1..16: note = Synthetic oligonucleotide
  source 1..16: mol_type = other DNA
actgcattgccctccc

SEQ ID NO: 822 - DNA, 16 bp, synthetic construct
  misc_feature 1..16: note = Synthetic oligonucleotide
  source 1..16: mol_type = other DNA
gcaccacagccgttcc

SEQ ID NO: 823 - DNA, 16 bp, synthetic construct
  misc_feature 1..16: note = Synthetic oligonucleotide
  source 1..16: mol_type = other DNA
acaggatcctgacaaa

SEQ ID NO: 824 - DNA, 16 bp, synthetic construct
  misc_feature 1..16: note = Synthetic oligonucleotide
  source 1..16: mol_type = other DNA
aaactgcaagctatgg

SEQ ID NO: 825 - DNA, 16 bp, synthetic construct
  misc_feature 1..16: note = Synthetic oligonucleotide
  source 1..16: mol_type = other DNA
tggacaggcaatacct

SEQ ID NO: 826 - DNA, 16 bp, synthetic construct
  misc_feature 1..16: note = Synthetic oligonucleotide
  source 1..16: mol_type = other DNA
atgaacgcaatgctga

SEQ ID NO: 827 - DNA, 16 bp, synthetic construct
  misc_feature 1..16: note = Synthetic oligonucleotide
  source 1..16: mol_type = other DNA
tgctctcggcttctaa

SEQ ID NO: 828 - DNA, 16 bp, synthetic construct
  misc_feature 1..16: note = Synthetic oligonucleotide
  source 1..16: mol_type = other DNA
acggctctccactgtc

SEQ ID NO: 829 - DNA, 16 bp, synthetic construct
  misc_feature 1..16: note = Synthetic oligonucleotide
  source 1..16: mol_type = other DNA
ggcactctcagatggg

SEQ ID NO: 830 - DNA, 16 bp, synthetic construct
  misc_feature 1..16: note = Synthetic oligonucleotide
  source 1..16: mol_type = other DNA
cacagcattgagtaca

SEQ ID NO: 831 - DNA, 16 bp, synthetic construct
  misc_feature 1..16: note = Synthetic oligonucleotide
  source 1..16: mol_type = other DNA
accatcaagcaggaag

SEQ ID NO: 832 - DNA, 16 bp, synthetic construct
  misc_feature 1..16: note = Synthetic oligonucleotide
  source 1..16: mol_type = other DNA
cccggccacctcattc

SEQ ID NO: 833 - DNA, 16 bp, synthetic construct
  misc_feature 1..16: note = Synthetic oligonucleotide
  source 1..16: mol_type = other DNA
accagtatgtatttgt

SEQ ID NO: 834 - DNA, 16 bp, synthetic construct
  misc_feature 1..16: note = Synthetic oligonucleotide
  source 1..16: mol_type = other DNA
tcagtacagagcagga

SEQ ID NO: 835 - DNA, 16 bp, synthetic construct
  misc_feature 1..16: note = Synthetic oligonucleotide
  source 1..16: mol_type = other DNA
acacatgtttcaacag

SEQ ID NO: 836 - DNA, 16 bp, synthetic construct
  misc_feature 1..16: note = Synthetic oligonucleotide
  source 1..16: mol_type = other DNA
ttttagaaaggacacg

SEQ ID NO: 837 - DNA, 16 bp, synthetic construct
  misc_feature 1..16: note = Synthetic oligonucleotide
  source 1..16: mol_type = other DNA
aaatatcagagtgtac

SEQ ID NO: 838 - DNA, 16 bp, synthetic construct
  misc_feature 1..16: note = Synthetic oligonucleotide
  source 1..16: mol_type = other DNA
gtcaaacactttatac

SEQ ID NO: 839 - DNA, 16 bp, synthetic construct
  misc_feature 1..16: note = Synthetic oligonucleotide
  source 1..16: mol_type = other DNA
gtgagccttccaggcc

SEQ ID NO: 840 - DNA, 16 bp, synthetic construct
  misc_feature 1..16: note = Synthetic oligonucleotide
  source 1..16: mol_type = other DNA
gatgttgaagtcaccc

SEQ ID NO: 841 - DNA, 16 bp, synthetic construct
  misc_feature 1..16: note = Synthetic oligonucleotide
  source 1..16: mol_type = other DNA
aagactgtgtgagcac

SEQ ID NO: 842 - DNA, 16 bp, synthetic construct
  misc_feature 1..16: note = Synthetic oligonucleotide
  source 1..16: mol_type = other DNA
tacatttggagatctg

SEQ ID NO: 843 - DNA, 16 bp, synthetic construct
  misc_feature 1..16: note = Synthetic oligonucleotide
  source 1..16: mol_type = other DNA
cattagtgctatagag

SEQ ID NO: 844 - DNA, 16 bp, synthetic construct
  misc_feature 1..16: note = Synthetic oligonucleotide
  source 1..16: mol_type = other DNA
attgcataagagatga

SEQ ID NO: 845 - DNA, 16 bp, synthetic construct
  misc_feature 1..16: note = Synthetic oligonucleotide
  source 1..16: mol_type = other DNA
cgaggaattcgaaagg

SEQ ID NO: 846 - DNA, 16 bp, synthetic construct
  misc_feature 1..16: note = Synthetic oligonucleotide
  source 1..16: mol_type = other DNA
tgtataataaccagac

SEQ ID NO: 847 - DNA, 16 bp, synthetic construct
  misc_feature 1..16: note = Synthetic oligonucleotide
  source 1..16: mol_type = other DNA
gtgcactcatccagat

SEQ ID NO: 848 - DNA, 16 bp, synthetic construct
  misc_feature 1..16: note = Synthetic oligonucleotide
  source 1..16: mol_type = other DNA
atctccagtatctgtc

SEQ ID NO: 849 - DNA, 16 bp, synthetic construct
  misc_feature 1..16: note = Synthetic oligonucleotide
  source 1..16: mol_type = other DNA
gattctgtgtgctcac

SEQ ID NO: 850 - DNA, 16 bp, synthetic construct
  misc_feature 1..16: note = Synthetic oligonucleotide
  source 1..16: mol_type = other DNA
atgttatcctcaagct

SEQ ID NO: 851 - DNA, 16 bp, synthetic construct
  misc_feature 1..16: note = Synthetic oligonucleotide
  source 1..16: mol_type = other DNA
tggaccttctgaaccc

SEQ ID NO: 852 - DNA, 16 bp, synthetic construct
  misc_feature 1..16: note = Synthetic oligonucleotide
  source 1..16: mol_type = other DNA
ccgacgagggtcagga

SEQ ID NO: 853 - DNA, 16 bp, synthetic construct
  misc_feature 1..16: note = Synthetic oligonucleotide
  source 1..16: mol_type = other DNA
actccatcccaggttc

SEQ ID NO: 854 - DNA, 16 bp, synthetic construct
  misc_feature 1..16: note = Synthetic oligonucleotide
  source 1..16: mol_type = other DNA
ccatggtactgctggt

SEQ ID NO: 855 - DNA, 16 bp, synthetic construct
  misc_feature 1..16: note = Synthetic oligonucleotide
  source 1..16: mol_type = other DNA
ttttgatgaccaggtc

SEQ ID NO: 856 - DNA, 16 bp, synthetic construct
  misc_feature 1..16: note = Synthetic oligonucleotide
  source 1..16: mol_type = other DNA
ccttcccaatgcctcg

SEQ ID NO: 857 - DNA, 16 bp, synthetic construct
  misc_feature 1..16: note = Synthetic oligonucleotide
  source 1..16: mol_type = other DNA
gcatgcggtactgact

SEQ ID NO: 858 - DNA, 16 bp, synthetic construct
  misc_feature 1..16: note = Synthetic oligonucleotide
  source 1..16: mol_type = other DNA
tccacctgttcaccgc

SEQ ID NO: 859 - DNA, 16 bp, synthetic construct
  misc_feature 1..16: note = Synthetic oligonucleotide
  source 1..16: mol_type = other DNA
tacatccagcacaaga

SEQ ID NO: 860 - DNA, 16 bp, synthetic construct
  misc_feature 1..16: note = Synthetic oligonucleotide
  source 1..16: mol_type = other DNA
cgcctgcagaatctta

SEQ ID NO: 861 - DNA, 16 bp, synthetic construct
  misc_feature 1..16: note = Synthetic oligonucleotide
  source 1..16: mol_type = other DNA
gcccctgccaggcata

SEQ ID NO: 862 - DNA, 16 bp, synthetic construct
  misc_feature 1..16: note = Synthetic oligonucleotide
  source 1..16: mol_type = other DNA
tgccaaagtccctaac

SEQ ID NO: 863 - DNA, 16 bp, synthetic construct
  misc_feature 1..16: note = Synthetic oligonucleotide
  source 1..16: mol_type = other DNA
ttcccttattgcaggc

SEQ ID NO: 864 - DNA, 16 bp, synthetic construct
  misc_feature 1..16: note = Synthetic oligonucleotide
  source 1..16: mol_type = other DNA
attcttccgtcaatat

SEQ ID NO: 865 - DNA, 16 bp, synthetic construct
  misc_feature 1..16: note = Synthetic oligonucleotide
  source 1..16: mol_type = other DNA
ggctgggtctgtagtg

SEQ ID NO: 866 - DNA, 16 bp, synthetic construct
  misc_feature 1..16: note = Synthetic oligonucleotide
  source 1..16: mol_type = other DNA
gctgcctgactgagat

SEQ ID NO: 867 - DNA, 16 bp, synthetic construct
  misc_feature 1..16: note = Synthetic oligonucleotide
  source 1..16: mol_type = other DNA
acccatcacatgacaa

SEQ ID NO: 868 - DNA, 16 bp, synthetic construct
  misc_feature 1..16: note = Synthetic oligonucleotide
  source 1..16: mol_type = other DNA
taccgggtaagagcga

SEQ ID NO: 869 - DNA, 16 bp, synthetic construct
  misc_feature 1..16: note = Synthetic oligonucleotide
  source 1..16: mol_type = other DNA
ggcggcgacaagacag

SEQ ID NO: 870 - DNA, 16 bp, synthetic construct
  misc_feature 1..16: note = Synthetic oligonucleotide
  source 1..16: mol_type = other DNA
acagcaaacacgctcc

SEQ ID NO: 871 - DNA, 16 bp, synthetic construct
  misc_feature 1..16: note = Synthetic oligonucleotide
  source 1..16: mol_type = other DNA
attctgcaacgcaccc

SEQ ID NO: 872 - DNA, 16 bp, synthetic construct
  misc_feature 1..16: note = Synthetic oligonucleotide
  source 1..16: mol_type = other DNA
ctgtccccaacttacc

SEQ ID NO: 873 - DNA, 16 bp, synthetic construct
  misc_feature 1..16: note = Synthetic oligonucleotide
  source 1..16: mol_type = other DNA
tccgcctccttcaacc

SEQ ID NO: 874 - DNA, 16 bp, synthetic construct
  misc_feature 1..16: note = Synthetic oligonucleotide
  source 1..16: mol_type = other DNA
caccctggatcccatc

SEQ ID NO: 875 - DNA, 16 bp, synthetic construct
  misc_feature 1..16: note = Synthetic oligonucleotide
  source 1..16: mol_type = other DNA
ctcttcatcttggtga

SEQ ID NO: 876 - DNA, 16 bp, synthetic construct
  misc_feature 1..16: note = Synthetic oligonucleotide
  source 1..16: mol_type = other DNA
ccagattgtttgtcta

SEQ ID NO: 877 - DNA, 16 bp, synthetic construct
  misc_feature 1..16: note = Synthetic oligonucleotide
  source 1..16: mol_type = other DNA
tgtcaccctaaggaga

SEQ ID NO: 878 - DNA, 16 bp, synthetic construct
  misc_feature 1..16: note = Synthetic oligonucleotide
  source 1..16: mol_type = other DNA
cgctgattccacttcc

SEQ ID NO: 879 - DNA, 16 bp, synthetic construct
  misc_feature 1..16: note = Synthetic oligonucleotide
  source 1..16: mol_type = other DNA
accccagggtcagctt

SEQ ID NO: 880 - DNA, 16 bp, synthetic construct
  misc_feature 1..16: note = Synthetic oligonucleotide
  source 1..16: mol_type = other DNA
cagttaagctggaagc

SEQ ID NO: 881 - DNA, 16 bp, synthetic construct
  misc_feature 1..16: note = Synthetic oligonucleotide
  source 1..16: mol_type = other DNA
gtagccgtgttatatt

SEQ ID NO: 882 - DNA, 16 bp, synthetic construct
  misc_feature 1..16: note = Synthetic oligonucleotide
  source 1..16: mol_type = other DNA
actgaactcagcccct

SEQ ID NO: 883 - DNA, 16 bp, synthetic construct
  misc_feature 1..16: note = Synthetic oligonucleotide
  source 1..16: mol_type = other DNA
gtttcccaattcagca

SEQ ID NO: 884 - DNA, 16 bp, synthetic construct
  misc_feature 1..16: note = Synthetic oligonucleotide
  source 1..16: mol_type = other DNA
ccttgtctccgacact

SEQ ID NO: 885 - DNA, 16 bp, synthetic construct
  misc_feature 1..16: note = Synthetic oligonucleotide
  source 1..16: mol_type = other DNA
gtaagtgcaaccaatc

SEQ ID NO: 886 - DNA, 16 bp, synthetic construct
  misc_feature 1..16: note = Synthetic oligonucleotide
  source 1..16: mol_type = other DNA
ccctaaactcacactg

SEQ ID NO: 887 - DNA, 16 bp, synthetic construct
  misc_feature 1..16: note = Synthetic oligonucleotide
  source 1..16: mol_type = other DNA
ggctaagttccggtct

SEQ ID NO: 888 - DNA, 16 bp, synthetic construct
  misc_feature 1..16: note = Synthetic oligonucleotide
  source 1..16: mol_type = other DNA
aaactccactgggccc

SEQ ID NO: 889 - DNA, 16 bp, synthetic construct
  misc_feature 1..16: note = Synthetic oligonucleotide
  source 1..16: mol_type = other DNA
aactgcattgccctcc

SEQ ID NO: 890 - DNA, 16 bp, synthetic construct
  misc_feature 1..16: note = Synthetic oligonucleotide
  source 1..16: mol_type = other DNA
ccgcaccacagccgtt

SEQ ID NO: 891 - DNA, 16 bp, synthetic construct
  misc_feature 1..16: note = Synthetic oligonucleotide
  source 1..16: mol_type = other DNA
cgctgggtctgaccca

SEQ ID NO: 892 - DNA, 16 bp, synthetic construct
  misc_feature 1..16: note = Synthetic oligonucleotide
  source 1..16: mol_type = other DNA
cacaggatcctgacaa

SEQ ID NO: 893 - DNA, 16 bp, synthetic construct
  misc_feature 1..16: note = Synthetic oligonucleotide
  source 1..16: mol_type = other DNA
agcaggttcacatgac

SEQ ID NO: 894 - DNA, 16 bp, synthetic construct
  misc_feature 1..16: note = Synthetic oligonucleotide
  source 1..16: mol_type = other DNA
cctgaaactgcaagct

SEQ ID NO: 895 - DNA, 16 bp, synthetic construct
  misc_feature 1..16: note = Synthetic oligonucleotide
  source 1..16: mol_type = other DNA
ctggacaggcaatacc

SEQ ID NO: 896 - DNA, 16 bp, synthetic construct
  misc_feature 1..16: note = Synthetic oligonucleotide
  source 1..16: mol_type = other DNA
ttggatggaaggaacc

SEQ ID NO: 897 - DNA, 16 bp, synthetic construct
  misc_feature 1..16: note = Synthetic oligonucleotide
  source 1..16: mol_type = other DNA
aatgaacgcaatgctg

SEQ ID NO: 898 - DNA, 16 bp, synthetic construct
  misc_feature 1..16: note = Synthetic oligonucleotide
  source 1..16: mol_type = other DNA
gtgctctcggcttcta

SEQ ID NO: 899 - DNA, 16 bp, synthetic construct
  misc_feature 1..16: note = Synthetic oligonucleotide
  source 1..16: mol_type = other DNA
cacggctctccactgt

SEQ ID NO: 900 - DNA, 16 bp, synthetic construct
  misc_feature 1..16: note = Synthetic oligonucleotide
  source 1..16: mol_type = other DNA
gggcactctcagatgg

SEQ ID NO: 901 - DNA, 16 bp, synthetic construct
  misc_feature 1..16: note = Synthetic oligonucleotide
  source 1..16: mol_type = other DNA
ccacagcattgagtac

SEQ ID NO: 902 - DNA, 16 bp, synthetic construct
  misc_feature 1..16: note = Synthetic oligonucleotide
  source 1..16: mol_type = other DNA
aaccatcaagcaggaa

SEQ ID NO: 903 - DNA, 16 bp, synthetic construct
  misc_feature 1..16: note = Synthetic oligonucleotide
  source 1..16: mol_type = other DNA
agtgcccggccacctc

SEQ ID NO: 904 - DNA, 16 bp, synthetic construct
  misc_feature 1..16: note = Synthetic oligonucleotide
  source 1..16: mol_type = other DNA
ggaccagtatgtattt

SEQ ID NO: 905 - DNA, 16 bp, synthetic construct
  misc_feature 1..16: note = Synthetic oligonucleotide
  source 1..16: mol_type = other DNA
gtcagtacagagcagg

SEQ ID NO: 906 - DNA, 16 bp, synthetic construct
  misc_feature 1..16: note = Synthetic oligonucleotide
  source 1..16: mol_type = other DNA
cacacatgtttcaaca

SEQ ID NO: 907 - DNA, 16 bp, synthetic construct
  misc_feature 1..16: note = Synthetic oligonucleotide
  source 1..16: mol_type = other DNA
atttccactattttag

SEQ ID NO: 908 - DNA, 16 bp, synthetic construct
  misc_feature 1..16: note = Synthetic oligonucleotide
  source 1..16: mol_type = other DNA
gaaaatatcagagtgt

SEQ ID NO: 909 - DNA, 16 bp, synthetic construct
  misc_feature 1..16: note = Synthetic oligonucleotide
  source 1..16: mol_type = other DNA
ggtcaaacactttata

SEQ ID NO: 910 - DNA, 16 bp, synthetic construct
  misc_feature 1..16: note = Synthetic oligonucleotide
  source 1..16: mol_type = other DNA
agtgagccttccaggc

SEQ ID NO: 911 - DNA, 16 bp, synthetic construct
  misc_feature 1..16: note = Synthetic oligonucleotide
  source 1..16: mol_type = other DNA
agatgttgaagtcacc

SEQ ID NO: 912 - DNA, 16 bp, synthetic construct
  misc_feature 1..16: note = Synthetic oligonucleotide
  source 1..16: mol_type = other DNA
gggacacaagaagact

SEQ ID NO: 913 - DNA, 16 bp, synthetic construct
  misc_feature 1..16: note = Synthetic oligonucleotide
  source 1..16: mol_type = other DNA
ctacatttggagatct

SEQ ID NO: 914 - DNA, 16 bp, synthetic construct
  misc_feature 1..16: note = Synthetic oligonucleotide
  source 1..16: mol_type = other DNA
tcattagtgctataga

SEQ ID NO: 915 - DNA, 16 bp, synthetic construct
  misc_feature 1..16: note = Synthetic oligonucleotide
  source 1..16: mol_type = other DNA
cattgcataagagatg

SEQ ID NO: 916 - DNA, 16 bp, synthetic construct
  misc_feature 1..16: note = Synthetic oligonucleotide
  source 1..16: mol_type = other DNA
ccgaggaattcgaaag

SEQ ID NO: 917 - DNA, 16 bp, synthetic construct
  misc_feature 1..16: note = Synthetic oligonucleotide
  source 1..16: mol_type = other DNA
ctgtataataaccaga

SEQ ID NO: 918 - DNA, 16 bp, synthetic construct
  misc_feature 1..16: note = Synthetic oligonucleotide
  source 1..16: mol_type = other DNA
agtgcactcatccaga

SEQ ID NO: 919 - DNA, 16 bp, synthetic construct
  misc_feature 1..16: note = Synthetic oligonucleotide
  source 1..16: mol_type = other DNA
gatctccagtatctgt

SEQ ID NO: 920 - DNA, 16 bp, synthetic construct
  misc_feature 1..16: note = Synthetic oligonucleotide
  source 1..16: mol_type = other DNA
tatgttatcctcaagc

SEQ ID NO: 921 - DNA, 16 bp, synthetic construct
  misc_feature 1..16: note = Synthetic oligonucleotide
  source 1..16: mol_type = other DNA
gtggaccttctgaacc

SEQ ID NO: 922 - DNA, 16 bp, synthetic construct
  misc_feature 1..16: note = Synthetic oligonucleotide
  source 1..16: mol_type = other DNA
gccgacgagggtcagg

SEQ ID NO: 923 - DNA, 16 bp, synthetic construct
  misc_feature 1..16: note = Synthetic oligonucleotide
  source 1..16: mol_type = other DNA
aactccatcccaggtt

SEQ ID NO: 924 - DNA, 16 bp, synthetic construct
  misc_feature 1..16: note = Synthetic oligonucleotide
  source 1..16: mol_type = other DNA
tccatggtactgctgg

SEQ ID NO: 925 - DNA, 16 bp, synthetic construct
  misc_feature 1..16: note = Synthetic oligonucleotide
  source 1..16: mol_type = other DNA
cttttgatgaccaggt

SEQ ID NO: 926 - DNA, 16 bp, synthetic construct
  misc_feature 1..16: note = Synthetic oligonucleotide
  source 1..16: mol_type = other DNA
gtccttcccaatgcct

SEQ ID NO: 927 - DNA, 16 bp, synthetic construct
  misc_feature 1..16: note = Synthetic oligonucleotide
  source 1..16: mol_type = other DNA
ggcatgcggtactgac

SEQ ID NO: 928 - DNA, 16 bp, synthetic construct
  misc_feature 1..16: note = Synthetic oligonucleotide
  source 1..16: mol_type = other DNA
ctccacctgttcaccg

SEQ ID NO: 929 - DNA, 16 bp, synthetic construct
  misc_feature 1..16: note = Synthetic oligonucleotide
  source 1..16: mol_type = other DNA
ctacatccagcacaag

SEQ ID NO: 930 - DNA, 16 bp, synthetic construct
  misc_feature 1..16: note = Synthetic oligonucleotide
  source 1..16: mol_type = other DNA
ccgcctgcagaatctt

SEQ ID NO: 931 - DNA, 16 bp, synthetic construct
  misc_feature 1..16: note = Synthetic oligonucleotide
  source 1..16: mol_type = other DNA
ttttgtcctggcccct

SEQ ID NO: 932 - DNA, 16 bp, synthetic construct
  misc_feature 1..16: note = Synthetic oligonucleotide
  source 1..16: mol_type = other DNA
atgccaaagtccctaa

SEQ ID NO: 933 - DNA, 16 bp, synthetic construct
  misc_feature 1..16: note = Synthetic oligonucleotide
  source 1..16: mol_type = other DNA
tttcccttattgcagg

SEQ ID NO: 934 - DNA, 16 bp, synthetic construct
  misc_feature 1..16: note = Synthetic oligonucleotide
  source 1..16: mol_type = other DNA
tattcttccgtcaata

SEQ ID NO: 935 - DNA, 16 bp, synthetic construct
  misc_feature 1..16: note = Synthetic oligonucleotide
  source 1..16: mol_type = other DNA
ggacattgaacctggg

SEQ ID NO: 936 - DNA, 16 bp, synthetic construct
  misc_feature 1..16: note = Synthetic oligonucleotide
  source 1..16: mol_type = other DNA
cgctgcctgactgaga

SEQ ID NO: 937 - DNA, 16 bp, synthetic construct
  misc_feature 1..16: note = Synthetic oligonucleotide
  source 1..16: mol_type = other DNA
gacccatcacatgaca

SEQ ID NO: 938 - DNA, 16 bp, synthetic construct
  misc_feature 1..16: note = Synthetic oligonucleotide
  source 1..16: mol_type = other DNA
ttaccgggtaagagcg

SEQ ID NO: 939 - DNA, 16 bp, synthetic construct
  misc_feature 1..16: note = Synthetic oligonucleotide
  source 1..16: mol_type = other DNA
gggcggcgacaagaca

SEQ ID NO: 940 - DNA, 16 bp, synthetic construct
  misc_feature 1..16: note = Synthetic oligonucleotide
  source 1..16: mol_type = other DNA
cacagcaaacacgctc

SEQ ID NO: 941 - DNA, 16 bp, synthetic construct
  misc_feature 1..16: note = Synthetic oligonucleotide
  source 1..16: mol_type = other DNA
cattctgcaacgcacc

SEQ ID NO: 942 - DNA, 16 bp, synthetic construct
  misc_feature 1..16: note = Synthetic oligonucleotide
  source 1..16: mol_type = other DNA
gcaggtcaactgtccc

SEQ ID NO: 943 - DNA, 16 bp, synthetic construct
  misc_feature 1..16: note = Synthetic oligonucleotide
  source 1..16: mol_type = other DNA
atccgcctccttcaac

SEQ ID NO: 944 - DNA, 16 bp, synthetic construct
  misc_feature 1..16: note = Synthetic oligonucleotide
  source 1..16: mol_type = other DNA
attcccccgacacttg

SEQ ID NO: 945 - DNA, 16 bp, synthetic construct
  misc_feature 1..16: note = Synthetic oligonucleotide
  source 1..16: mol_type = other DNA
actcttcatcttggtg

SEQ ID NO: 946 - DNA, 16 bp, synthetic construct
  misc_feature 1..16: note = Synthetic oligonucleotide
  source 1..16: mol_type = other DNA
aacctaaaccagattg

SEQ ID NO: 947 - DNA, 16 bp, synthetic construct
  misc_feature 1..16: note = Synthetic oligonucleotide
  source 1..16: mol_type = other DNA
gtgtcaccctaaggag

SEQ ID NO: 948 - DNA, 16 bp, synthetic construct
  misc_feature 1..16: note = Synthetic oligonucleotide
  source 1..16: mol_type = other DNA
ccgctgattccacttc

SEQ ID NO: 949 - DNA, 16 bp, synthetic construct
  misc_feature 1..16: note = Synthetic oligonucleotide
  source 1..16: mol_type = other DNA
caggtggaaacacccc

SEQ ID NO: 950 - DNA, 16 bp, synthetic construct
  misc_feature 1..16: note = Synthetic oligonucleotide
  source 1..16: mol_type = other DNA
ccagttaagctggaag

SEQ ID NO: 951 - DNA, 16 bp, synthetic construct
  misc_feature 1..16: note = Synthetic oligonucleotide
  source 1..16: mol_type = other DNA
ggtagccgtgttatat

SEQ ID NO: 952 - DNA, 16 bp, synthetic construct
  misc_feature 1..16: note = Synthetic oligonucleotide
  source 1..16: mol_type = other DNA
gactgaactcagcccc

SEQ ID NO: 953 - DNA, 16 bp, synthetic construct
  misc_feature 1..16: note = Synthetic oligonucleotide
  source 1..16: mol_type = other DNA
tgtttcccaattcagc

SEQ ID NO: 954 - DNA, 16 bp, synthetic construct
  misc_feature 1..16: note = Synthetic oligonucleotide
  source 1..16: mol_type = other DNA
accttgtctccgacac

SEQ ID NO: 955 - DNA, 16 bp, synthetic construct
  misc_feature 1..16: note = Synthetic oligonucleotide
  source 1..16: mol_type = other DNA
tgtaagtgcaaccaat

SEQ ID NO: 956 - DNA, 16 bp, synthetic construct
  misc_feature 1..16: note = Synthetic oligonucleotide
  source 1..16: mol_type = other DNA
tccctaaactcacact

SEQ ID NO: 957 - DNA, 16 bp, synthetic construct
  misc_feature 1..16: note = Synthetic oligonucleotide
  source 1..16: mol_type = other DNA
aggctaagttccggtc

SEQ ID NO: 958 - DNA, 16 bp, synthetic construct
  misc_feature 1..16: note = Synthetic oligonucleotide
  source 1..16: mol_type = other DNA
caaactccactgggcc

SEQ ID NO: 959 - DNA, 16 bp, synthetic construct
  misc_feature 1..16: note = Synthetic oligonucleotide
  source 1..16: mol_type = other DNA
aaactgcattgccctc

SEQ ID NO: 960 - DNA, 16 bp, synthetic construct
  misc_feature 1..16: note = Synthetic oligonucleotide
  source 1..16: mol_type = other DNA
cccgcaccacagccgt

SEQ ID NO: 961 - DNA, 16 bp, synthetic construct
  misc_feature 1..16: note = Synthetic oligonucleotide
  source 1..16: mol_type = other DNA
gcgctgggtctgaccc

SEQ ID NO: 962 - DNA, 16 bp, synthetic construct
  misc_feature 1..16: note = Synthetic oligonucleotide
  source 1..16: mol_type = other DNA
ccacaggatcctgaca

SEQ ID NO: 963 - DNA, 16 bp, synthetic construct
  misc_feature 1..16: note = Synthetic oligonucleotide
  source 1..16: mol_type = other DNA
taaagccagctgacag

SEQ ID NO: 964 - DNA, 16 bp, synthetic construct
  misc_feature 1..16: note = Synthetic oligonucleotide
  source 1..16: mol_type = other DNA
ccctgaaactgcaagc

SEQ ID NO: 965 - DNA, 16 bp, synthetic construct
  misc_feature 1..16: note = Synthetic oligonucleotide
  source 1..16: mol_type = other DNA
cctggacaggcaatac

SEQ ID NO: 966 - DNA, 16 bp, synthetic construct
  misc_feature 1..16: note = Synthetic oligonucleotide
  source 1..16: mol_type = other DNA
tttggatggaaggaac

SEQ ID NO: 967 - DNA, 16 bp, synthetic construct
  misc_feature 1..16: note = Synthetic oligonucleotide
  source 1..16: mol_type = other DNA
aaatgaacgcaatgct

SEQ ID NO: 968 - DNA, 16 bp, synthetic construct
  misc_feature 1..16: note = Synthetic oligonucleotide
  source 1..16: mol_type = other DNA
agtgctctcggcttct

SEQ ID NO: 969 - DNA, 16 bp, synthetic construct
  misc_feature 1..16: note = Synthetic oligonucleotide
  source 1..16: mol_type = other DNA
acacggctctccactg

SEQ ID NO: 970 - DNA, 16 bp, synthetic construct
  misc_feature 1..16: note = Synthetic oligonucleotide
  source 1..16: mol_type = other DNA
tgggcactctcagatg

SEQ ID NO: 971 - DNA, 16 bp, synthetic construct
  misc_feature 1..16: note = Synthetic oligonucleotide
  source 1..16: mol_type = other DNA
actccacagcattgag

SEQ ID NO: 972 - DNA, 16 bp, synthetic construct
  misc_feature 1..16: note = Synthetic oligonucleotide
  source 1..16: mol_type = other DNA
aaaccatcaagcagga

SEQ ID NO: 973 - DNA, 16 bp, synthetic construct
  misc_feature 1..16: note = Synthetic oligonucleotide
  source 1..16: mol_type = other DNA
acaagagacctcattc

SEQ ID NO: 974 - DNA, 16 bp, synthetic construct
  misc_feature 1..16: note = Synthetic oligonucleotide
  source 1..16: mol_type = other DNA
gggaccagtatgtatt

SEQ ID NO: 975 - DNA, 16 bp, synthetic construct
  misc_feature 1..16: note = Synthetic oligonucleotide
  source 1..16: mol_type = other DNA
aagtcagtacagagca

SEQ ID NO: 976 - DNA, 16 bp, synthetic construct
  misc_feature 1..16: note = Synthetic oligonucleotide
  source 1..16: mol_type = other DNA
ccacacatgtttcaac

SEQ ID NO: 977 - DNA, 16 bp, synthetic construct
  misc_feature 1..16: note = Synthetic oligonucleotide
  source 1..16: mol_type = other DNA
gaatttccactatttt

SEQ ID NO: 978 - DNA, 16 bp, synthetic construct
  misc_feature 1..16: note = Synthetic oligonucleotide
  source 1..16: mol_type = other DNA
ggttcaaaagcagcat

SEQ ID NO: 979 - DNA, 16 bp, synthetic construct
  misc_feature 1..16: note = Synthetic oligonucleotide
  source 1..16: mol_type = other DNA
gggtcaaacactttat

SEQ ID NO: 980 - DNA, 16 bp, synthetic construct
  misc_feature 1..16: note = Synthetic oligonucleotide
  source 1..16: mol_type = other DNA
aagtgagccttccagg

SEQ ID NO: 981 - DNA, 16 bp, synthetic construct
  misc_feature 1..16: note = Synthetic oligonucleotide
  source 1..16: mol_type = other DNA
cagatgttgaagtcac

SEQ ID NO: 982 - DNA, 16 bp, synthetic construct
  misc_feature 1..16: note = Synthetic oligonucleotide
  source 1..16: mol_type = other DNA
cctattgtaagaacag

SEQ ID NO: 983 - DNA, 16 bp, synthetic construct
  misc_feature 1..16: note = Synthetic oligonucleotide
  source 1..16: mol_type = other DNA
tcaggtgactacattt

SEQ ID NO: 984 - DNA, 16 bp, synthetic construct
  misc_feature 1..16: note = Synthetic oligonucleotide
  source 1..16: mol_type = other DNA
gtcattagtgctatag

SEQ ID NO: 985 - DNA, 16 bp, synthetic construct
  misc_feature 1..16: note = Synthetic oligonucleotide
  source 1..16: mol_type = other DNA
ccattgcataagagat

SEQ ID NO: 986 - DNA, 16 bp, synthetic construct
  misc_feature 1..16: note = Synthetic oligonucleotide
  source 1..16: mol_type = other DNA
accgaggaattcgaaa

SEQ ID NO: 987 - DNA, 16 bp, synthetic construct
  misc_feature 1..16: note = Synthetic oligonucleotide
  source 1..16: mol_type = other DNA
cgtctgtataataacc

SEQ ID NO: 988 - DNA, 16 bp, synthetic construct
  misc_feature 1..16: note = Synthetic oligonucleotide
  source 1..16: mol_type = other DNA
aagtgcactcatccag

SEQ ID NO: 989 - DNA, 16 bp, synthetic construct
  misc_feature 1..16: note = Synthetic oligonucleotide
  source 1..16: mol_type = other DNA
ggatctccagtatctg

SEQ ID NO: 990 - DNA, 16 bp, synthetic construct
  misc_feature 1..16: note = Synthetic oligonucleotide
  source 1..16: mol_type = other DNA
ttatgttatcctcaag

SEQ ID NO: 991 - DNA, 16 bp, synthetic construct
  misc_feature 1..16: note = Synthetic oligonucleotide
  source 1..16: mol_type = other DNA
tgtggaccttctgaac

SEQ ID NO: 992 - DNA, 16 bp, synthetic construct
  misc_feature 1..16: note = Synthetic oligonucleotide
  source 1..16: mol_type = other DNA
tgccgacgagggtcag

SEQ ID NO: 993 - DNA, 16 bp, synthetic construct
  misc_feature 1..16: note = Synthetic oligonucleotide
  source 1..16: mol_type = other DNA
caactccatcccaggt

SEQ ID NO: 994 - DNA, 16 bp, synthetic construct
  misc_feature 1..16: note = Synthetic oligonucleotide
  source 1..16: mol_type = other DNA
agtccatggtactgct

SEQ ID NO: 995 - DNA, 16 bp, synthetic construct
  misc_feature 1..16: note = Synthetic oligonucleotide
  source 1..16: mol_type = other DNA
gcttttgatgaccagg

SEQ ID NO: 996 - DNA, 16 bp, synthetic construct
  misc_feature 1..16: note = Synthetic oligonucleotide
  source 1..16: mol_type = other DNA
tgtccttcccaatgcc

SEQ ID NO: 997 - DNA, 16 bp, synthetic construct
  misc_feature 1..16: note = Synthetic oligonucleotide
  source 1..16: mol_type = other DNA
gaggcatgcggtactg

SEQ ID NO: 998 - DNA, 16 bp, synthetic construct
  misc_feature 1..16: note = Synthetic oligonucleotide
  source 1..16: mol_type = other DNA
tctccacctgttcacc

SEQ ID NO: 999 - DNA, 16 bp, synthetic construct
  misc_feature 1..16: note = Synthetic oligonucleotide
  source 1..16: mol_type = other DNA
agactacatccagcac

SEQ ID NO: 1000 - DNA, 16 bp, synthetic construct
  misc_feature 1..16: note = Synthetic oligonucleotide
  source 1..16: mol_type = other DNA
tccgcctgcagaatct

SEQ ID NO: 1001 - DNA, 16 bp, synthetic construct
  misc_feature 1..16: note = Synthetic oligonucleotide
  source 1..16: mol_type = other DNA
attttgtcctggcccc

SEQ ID NO: 1002 - DNA, 16 bp, synthetic construct
  misc_feature 1..16: note = Synthetic oligonucleotide
  source 1..16: mol_type = other DNA
tggaaatgccaaagtc

SEQ ID NO: 1003 - DNA, 16 bp, synthetic construct
  misc_feature 1..16: note = Synthetic oligonucleotide
  source 1..16: mol_type = other DNA
cagttcccatttttcc

SEQ ID NO: 1004 - DNA, 16 bp, synthetic construct
  misc_feature 1..16: note = Synthetic oligonucleotide
  source 1..16: mol_type = other DNA
ctattcttccgtcaat

SEQ ID NO: 1005 - DNA, 16 bp, synthetic construct
  misc_feature 1..16: note = Synthetic oligonucleotide
  source 1..16: mol_type = other DNA
aggacattgaacctgg

SEQ ID NO: 1006 - DNA, 16 bp, synthetic construct
  misc_feature 1..16: note = Synthetic oligonucleotide
  source 1..16: mol_type = other DNA
ccgctgcctgactgag

SEQ ID NO: 1007 - DNA, 16 bp, synthetic construct
  misc_feature 1..16: note = Synthetic oligonucleotide
  source 1..16: mol_type = other DNA
ggacccatcacatgac

SEQ ID NO: 1008 - DNA, 16 bp, synthetic construct
  misc_feature 1..16: note = Synthetic oligonucleotide
  source 1..16: mol_type = other DNA
cttaccgggtaagagc

SEQ ID NO: 1009 - DNA, 16 bp, synthetic construct
  misc_feature 1..16: note = Synthetic oligonucleotide
  source 1..16: mol_type = other DNA
tgggcggcgacaagac

SEQ ID NO: 1010 - DNA, 16 bp, synthetic construct
  misc_feature 1..16: note = Synthetic oligonucleotide
  source 1..16: mol_type = other DNA
accaagcacagcaaac

SEQ ID NO: 1011 - DNA, 16 bp, synthetic construct
  misc_feature 1..16: note = Synthetic oligonucleotide
  source 1..16: mol_type = other DNA
accattctgcaacgca

SEQ ID NO: 1012 - DNA, 16 bp, synthetic construct
  misc_feature 1..16: note = Synthetic oligonucleotide
  source 1..16: mol_type = other DNA
ggaggcaggtcaactg

SEQ ID NO: 1013 - DNA, 16 bp, synthetic construct
  misc_feature 1..16: note = Synthetic oligonucleotide
  source 1..16: mol_type = other DNA
tgaccacctgtcttgg

SEQ ID NO: 1014 - DNA, 16 bp, synthetic construct
  misc_feature 1..16: note = Synthetic oligonucleotide
  source 1..16: mol_type = other DNA
ggtgcctcggattccc

SEQ ID NO: 1015 - DNA, 16 bp, synthetic construct
  misc_feature 1..16: note = Synthetic oligonucleotide
  source 1..16: mol_type = other DNA
gtgctcaactcttcat

SEQ ID NO: 1016 - DNA, 16 bp, synthetic construct
  misc_feature 1..16: note = Synthetic oligonucleotide
  source 1..16: mol_type = other DNA
ccaagaccaacctaaa

SEQ ID NO: 1017 - DNA, 16 bp, synthetic construct
  misc_feature 1..16: note = Synthetic oligonucleotide
  source 1..16: mol_type = other DNA
cgtgtcaccctaagga

SEQ ID NO: 1018 - DNA, 16 bp, synthetic construct
  misc_feature 1..16: note = Synthetic oligonucleotide
  source 1..16: mol_type = other DNA
cccgctgattccactt

SEQ ID NO: 1019 - DNA, 16 bp, synthetic construct
  misc_feature 1..16: note = Synthetic oligonucleotide
  source 1..16: mol_type = other DNA
tcaggtggaaacaccc

SEQ ID NO: 1020 - DNA, 16 bp, synthetic construct
  misc_feature 1..16: note = Synthetic oligonucleotide
  source 1..16: mol_type = other DNA
tccagttaagctggaa

SEQ ID NO: 1021 - DNA, 16 bp, synthetic construct
  misc_feature 1..16: note = Synthetic oligonucleotide
  source 1..16: mol_type = other DNA
caggtagccgtgttat

SEQ ID NO: 1022 - DNA, 16 bp, synthetic construct
  misc_feature 1..16: note = Synthetic oligonucleotide
  source 1..16: mol_type = other DNA
tgactgaactcagccc

SEQ ID NO: 1023 - DNA, 16 bp, synthetic construct
  misc_feature 1..16: note = Synthetic oligonucleotide
  source 1..16: mol_type = other DNA
gctgtttcccaattca

SEQ ID NO: 1024 - DNA, 16 bp, synthetic construct
  misc_feature 1..16: note = Synthetic oligonucleotide
  source 1..16: mol_type = other DNA
aaccttgtctccgaca

SEQ ID NO: 1025 - DNA, 16 bp, synthetic construct
  misc_feature 1..16: note = Synthetic oligonucleotide
  source 1..16: mol_type = other DNA
ttgtaagtgcaaccaa

SEQ ID NO: 1026 - DNA, 16 bp, synthetic construct
  misc_feature 1..16: note = Synthetic oligonucleotide
  source 1..16: mol_type = other DNA
gacctccctaaactca

SEQ ID NO: 1027 - DNA, 16 bp, synthetic construct
  misc_feature 1..16: note = Synthetic oligonucleotide
  source 1..16: mol_type = other DNA
aaggctaagttccggt

SEQ ID NO: 1028 - DNA, 16 bp, synthetic construct
  misc_feature 1..16: note = Synthetic oligonucleotide
  source 1..16: mol_type = other DNA
gacaagaaccccaaac

SEQ ID NO: 1029 - DNA, 16 bp, synthetic construct
  misc_feature 1..16: note = Synthetic oligonucleotide
  source 1..16: mol_type = other DNA
aaaactgcattgccct

SEQ ID NO: 1030 - DNA, 16 bp, synthetic construct
  misc_feature 1..16: note = Synthetic oligonucleotide
  source 1..16: mol_type = other DNA
acccgcaccacagccg

SEQ ID NO: 1031 - DNA, 16 bp, synthetic construct
  misc_feature 1..16: note = Synthetic oligonucleotide
  source 1..16: mol_type = other DNA
agatccaactcggcgc

SEQ ID NO: 1032 - DNA, 16 bp, synthetic construct
  misc_feature 1..16: note = Synthetic oligonucleotide
  source 1..16: mol_type = other DNA
cccacaggatcctgac

SEQ ID NO: 1033 - DNA, 16 bp, synthetic construct
  misc_feature 1..16: note = Synthetic oligonucleotide
  source 1..16: mol_type = other DNA
cttaaagccagctgac

SEQ ID NO: 1034 - DNA, 16 bp, synthetic construct
  misc_feature 1..16: note = Synthetic oligonucleotide
  source 1..16: mol_type = other DNA
ccccctgaaactgcaa

SEQ ID NO: 1035 - DNA, 16 bp, synthetic construct
  misc_feature 1..16: note = Synthetic oligonucleotide
  source 1..16: mol_type = other DNA
tcctggacaggcaata

SEQ ID NO: 1036 - DNA, 16 bp, synthetic construct
  misc_feature 1..16: note = Synthetic oligonucleotide
  source 1..16: mol_type = other DNA
aggtttggatggaagg

SEQ ID NO: 1037 - DNA, 16 bp, synthetic construct
  misc_feature 1..16: note = Synthetic oligonucleotide
  source 1..16: mol_type = other DNA
gaaatgaacgcaatgc

SEQ ID NO: 1038 - DNA, 16 bp, synthetic construct
  misc_feature 1..16: note = Synthetic oligonucleotide
  source 1..16: mol_type = other DNA
gagtgctctcggcttc

SEQ ID NO: 1039 - DNA, 16 bp, synthetic construct
  misc_feature 1..16: note = Synthetic oligonucleotide
  source 1..16: mol_type = other DNA
tacacggctctccact

SEQ ID NO: 1040 - DNA, 16 bp, synthetic construct
  misc_feature 1..16: note = Synthetic oligonucleotide
  source 1..16: mol_type = other DNA
ttgggcactctcagat

SEQ ID NO: 1041 - DNA, 16 bp, synthetic construct
  misc_feature 1..16: note = Synthetic oligonucleotide
  source 1..16: mol_type = other DNA
aactccacagcattga

SEQ ID NO: 1042 - DNA, 16 bp, synthetic construct
  misc_feature 1..16: note = Synthetic oligonucleotide
  source 1..16: mol_type = other DNA
gcccaaaaccatcaag

SEQ ID NO: 1043 - DNA, 16 bp, synthetic construct
  misc_feature 1..16: note = Synthetic oligonucleotide
  source 1..16: mol_type = other DNA
cacaagagacctcatt

SEQ ID NO: 1044 - DNA, 16 bp, synthetic construct
  misc_feature 1..16: note = Synthetic oligonucleotide
  source 1..16: mol_type = other DNA
tatggaattgcagata

SEQ ID NO: 1045 - DNA, 16 bp, synthetic construct
  misc_feature 1..16: note = Synthetic oligonucleotide
  source 1..16: mol_type = other DNA
caagtcagtacagagc

SEQ ID NO: 1046 - DNA, 16 bp, synthetic construct
  misc_feature 1..16: note = Synthetic oligonucleotide
  source 1..16: mol_type = other DNA
cccacacatgtttcaa

SEQ ID NO: 1047 - DNA, 16 bp, synthetic construct
  misc_feature 1..16: note = Synthetic oligonucleotide
  source 1..16: mol_type = other DNA
agaatttccactattt

SEQ ID NO: 1048 - DNA, 16 bp, synthetic construct
  misc_feature 1..16: note = Synthetic oligonucleotide
  source 1..16: mol_type = other DNA
tggttcaaaagcagca

SEQ ID NO: 1049 - DNA, 16 bp, synthetic construct
  misc_feature 1..16: note = Synthetic oligonucleotide
  source 1..16: mol_type = other DNA
tgggtcaaacacttta

SEQ ID NO: 1050 - DNA, 16 bp, synthetic construct
  misc_feature 1..16: note = Synthetic oligonucleotide
  source 1..16: mol_type = other DNA
gaagtgagccttccag

SEQ ID NO: 1051 - DNA, 16 bp, synthetic construct
  misc_feature 1..16: note = Synthetic oligonucleotide
  source 1..16: mol_type = other DNA
ccagatgttgaagtca

SEQ ID NO: 1052 - DNA, 16 bp, synthetic construct
  misc_feature 1..16: note = Synthetic oligonucleotide
  source 1..16: mol_type = other DNA
tcctattgtaagaaca

SEQ ID NO: 1053 - DNA, 16 bp, synthetic construct
  misc_feature 1..16: note = Synthetic oligonucleotide
  source 1..16: mol_type = other DNA
ctcaggtgactacatt

SEQ ID NO: 1054 - DNA, 16 bp, synthetic construct
  misc_feature 1..16: note = Synthetic oligonucleotide
  source 1..16: mol_type = other DNA
agtcattagtgctata

SEQ ID NO: 1055 - DNA, 16 bp, synthetic construct
  misc_feature 1..16: note = Synthetic oligonucleotide
  source 1..16: mol_type = other DNA
gccattgcataagaga

SEQ ID NO: 1056 - DNA, 16 bp, synthetic construct
  misc_feature 1..16: note = Synthetic oligonucleotide
  source 1..16: mol_type = other DNA
taccgaggaattcgaa

SEQ ID NO: 1057 - DNA, 16 bp, synthetic construct
  misc_feature 1..16: note = Synthetic oligonucleotide
  source 1..16: mol_type = other DNA
cacctccagttatgcg

SEQ ID NO: 1058 - DNA, 16 bp, synthetic construct
  misc_feature 1..16: note = Synthetic oligonucleotide
  source 1..16: mol_type = other DNA
aaagtgcactcatcca

SEQ ID NO: 1059 - DNA, 16 bp, synthetic construct
  misc_feature 1..16: note = Synthetic oligonucleotide
  source 1..16: mol_type = other DNA
aggatctccagtatct

SEQ ID NO: 1060 - DNA, 16 bp, synthetic construct
  misc_feature 1..16: note = Synthetic oligonucleotide
  source 1..16: mol_type = other DNA
cttatgttatcctcaa

SEQ ID NO: 1061 - DNA, 16 bp, synthetic construct
  misc_feature 1..16: note = Synthetic oligonucleotide
  source 1..16: mol_type = other DNA
ttgtggaccttctgaa

SEQ ID NO: 1062 - DNA, 16 bp, synthetic construct
  misc_feature 1..16: note = Synthetic oligonucleotide
  source 1..16: mol_type = other DNA
atgccgacgagggtca

SEQ ID NO: 1063 - DNA, 16 bp, synthetic construct
  misc_feature 1..16: note = Synthetic oligonucleotide
  source 1..16: mol_type = other DNA
gattcccaactccatc

SEQ ID NO: 1064 - DNA, 16 bp, synthetic construct
  misc_feature 1..16: note = Synthetic oligonucleotide
  source 1..16: mol_type = other DNA
tagtccatggtactgc

SEQ ID NO: 1065 - DNA, 16 bp, synthetic construct
  misc_feature 1..16: note = Synthetic oligonucleotide
  source 1..16: mol_type = other DNA
aggcttttgatgacca

SEQ ID NO: 1066 - DNA, 16 bp, synthetic construct
  misc_feature 1..16: note = Synthetic oligonucleotide
  source 1..16: mol_type = other DNA
atgtccttcccaatgc

SEQ ID NO: 1067 - DNA, 16 bp, synthetic construct
  misc_feature 1..16: note = Synthetic oligonucleotide
  source 1..16: mol_type = other DNA
tgaggcatgcggtact

SEQ ID NO: 1068 - DNA, 16 bp, synthetic construct
  misc_feature 1..16: note = Synthetic oligonucleotide
  source 1..16: mol_type = other DNA
accctctccacctgtt

SEQ ID NO: 1069 - DNA, 16 bp, synthetic construct
  misc_feature 1..16: note = Synthetic oligonucleotide
  source 1..16: mol_type = other DNA
tagactacatccagca

SEQ ID NO: 1070 - DNA, 16 bp, synthetic construct
  misc_feature 1..16: note = Synthetic oligonucleotide
  source 1..16: mol_type = other DNA
gtccgcctgcagaatc

SEQ ID NO: 1071 - DNA, 16 bp, synthetic construct
  misc_feature 1..16: note = Synthetic oligonucleotide
  source 1..16: mol_type = other DNA
aaaagcgatggctcac

SEQ ID NO: 1072 - DNA, 16 bp, synthetic construct
  misc_feature 1..16: note = Synthetic oligonucleotide
  source 1..16: mol_type = other DNA
gctatggaaatgccaa

SEQ ID NO: 1073 - DNA, 16 bp, synthetic construct
  misc_feature 1..16: note = Synthetic oligonucleotide
  source 1..16: mol_type = other DNA
tccagttcccattttt

SEQ ID NO: 1074 - DNA, 16 bp, synthetic construct
  misc_feature 1..16: note = Synthetic oligonucleotide
  source 1..16: mol_type = other DNA
ctctctattcttccgt

SEQ ID NO: 1075 - DNA, 16 bp, synthetic construct
  misc_feature 1..16: note = Synthetic oligonucleotide
  source 1..16: mol_type = other DNA
ggaggacattgaacct

SEQ ID NO: 1076 - DNA, 16 bp, synthetic construct
  misc_feature 1..16: note = Synthetic oligonucleotide
  source 1..16: mol_type = other DNA
gccgctgcctgactga

SEQ ID NO: 1077 - DNA, 16 bp, synthetic construct
  misc_feature 1..16: note = Synthetic oligonucleotide
  source 1..16: mol_type = other DNA
cagtgttcaagcaggg

SEQ ID NO: 1078 - DNA, 16 bp, synthetic construct
  misc_feature 1..16: note = Synthetic oligonucleotide
  source 1..16: mol_type = other DNA
acttaccgggtaagag

SEQ ID NO: 1079 - DNA, 16 bp, synthetic construct
  misc_feature 1..16: note = Synthetic oligonucleotide
  source 1..16: mol_type = other DNA
ctgggcggcgacaaga

SEQ ID NO: 1080 - DNA, 16 bp, synthetic construct
  misc_feature 1..16: note = Synthetic oligonucleotide
  source 1..16: mol_type = other DNA
gaccaagcacagcaaa

SEQ ID NO: 1081 - DNA, 16 bp, synthetic construct
  misc_feature 1..16: note = Synthetic oligonucleotide
  source 1..16: mol_type = other DNA
caccattctgcaacgc

SEQ ID NO: 1082 - DNA, 16 bp, synthetic construct
  misc_feature 1..16: note = Synthetic oligonucleotide
  source 1..16: mol_type = other DNA
caatcagactcaagcc

SEQ ID NO: 1083 - DNA, 16 bp, synthetic construct
  misc_feature 1..16: note = Synthetic oligonucleotide
  source 1..16: mol_type = other DNA
cgtgaccacctgtctt

SEQ ID NO: 1084 - DNA, 16 bp, synthetic construct
  misc_feature 1..16: note = Synthetic oligonucleotide
  source 1..16: mol_type = other DNA
gagctggtgcctcgga

SEQ ID NO: 1085 - DNA, 16 bp, synthetic construct
  misc_feature 1..16: note = Synthetic oligonucleotide
  source 1..16: mol_type = other DNA
cctcattgcaaatcct

SEQ ID NO: 1086 - DNA, 16 bp, synthetic construct
  misc_feature 1..16: note = Synthetic oligonucleotide
  source 1..16: mol_type = other DNA
gctctgcaaatctctc

SEQ ID NO: 1087 - DNA, 16 bp, synthetic construct
  misc_feature 1..16: note = Synthetic oligonucleotide
  source 1..16: mol_type = other DNA
ccgtgtcaccctaagg

SEQ ID NO: 1088 - DNA, 16 bp, synthetic construct
  misc_feature 1..16: note = Synthetic oligonucleotide
  source 1..16: mol_type = other DNA
ccccgctgattccact

SEQ ID NO: 1089 - DNA, 16 bp, synthetic construct
  misc_feature 1..16: note = Synthetic oligonucleotide
  source 1..16: mol_type = other DNA
ctcaggtggaaacacc

SEQ ID NO: 1090 - DNA, 16 bp, synthetic construct
  misc_feature 1..16: note = Synthetic oligonucleotide
  source 1..16: mol_type = other DNA
gtccagttaagctgga

SEQ ID NO: 1091 - DNA, 16 bp, synthetic construct
  misc_feature 1..16: note = Synthetic oligonucleotide
  source 1..16: mol_type = other DNA
ccaggtagccgtgtta

SEQ ID NO: 1092 - DNA, 16 bp, synthetic construct
  misc_feature 1..16: note = Synthetic oligonucleotide
  source 1..16: mol_type = other DNA
atgactgaactcagcc

SEQ ID NO: 1093 - DNA, 16 bp, synthetic construct
  misc_feature 1..16: note = Synthetic oligonucleotide
  source 1..16: mol_type = other DNA
cctccagtttgctgtt

SEQ ID NO: 1094 - DNA, 16 bp, synthetic construct
  misc_feature 1..16: note = Synthetic oligonucleotide
  source 1..16: mol_type = other DNA
aaaccttgtctccgac

SEQ ID NO: 1095 - DNA, 16 bp, synthetic construct
  misc_feature 1..16: note = Synthetic oligonucleotide
  source 1..16: mol_type = other DNA
tttgtaagtgcaacca

SEQ ID NO: 1096 - DNA, 16 bp, synthetic construct
  misc_feature 1..16: note = Synthetic oligonucleotide
  source 1..16: mol_type = other DNA
agacctccctaaactc

SEQ ID NO: 1097 - DNA, 16 bp, synthetic construct
  misc_feature 1..16: note = Synthetic oligonucleotide
  source 1..16: mol_type = other DNA
caaggctaagttccgg

SEQ ID NO: 1098 - DNA, 16 bp, synthetic construct
  misc_feature 1..16: note = Synthetic oligonucleotide
  source 1..16: mol_type = other DNA
aagacaagaaccccaa

SEQ ID NO: 1099 - DNA, 16 bp, synthetic construct
  misc_feature 1..16: note = Synthetic oligonucleotide
  source 1..16: mol_type = other DNA
caaaactgcattgccc

SEQ ID NO: 1100 - DNA, 16 bp, synthetic construct
  misc_feature 1..16: note = Synthetic oligonucleotide
  source 1..16: mol_type = other DNA
acccacccgcaccaca

SEQ ID NO: 1101 - DNA, 16 bp, synthetic construct
  misc_feature 1..16: note = Synthetic oligonucleotide
  source 1..16: mol_type = other DNA
gagatccaactcggcg

SEQ ID NO: 1102 - DNA, 16 bp, synthetic construct
  misc_feature 1..16: note = Synthetic oligonucleotide
  source 1..16: mol_type = other DNA
gcccacaggatcctga

SEQ ID NO: 1103 - DNA, 16 bp, synthetic construct
  misc_feature 1..16: note = Synthetic oligonucleotide
  source 1..16: mol_type = other DNA
aaccccctgaaactgc

SEQ ID NO: 1104 - DNA, 16 bp, synthetic construct
  misc_feature 1..16: note = Synthetic oligonucleotide
  source 1..16: mol_type = other DNA
ttcctggacaggcaat

SEQ ID NO: 1105 - DNA, 16 bp, synthetic construct
  misc_feature 1..16: note = Synthetic oligonucleotide
  source 1..16: mol_type = other DNA
caggtttggatggaag

SEQ ID NO: 1106 - DNA, 16 bp, synthetic construct
  misc_feature 1..16: note = Synthetic oligonucleotide
  source 1..16: mol_type = other DNA
ggaaatgaacgcaatg

SEQ ID NO: 1107 - DNA, 16 bp, synthetic construct
  misc_feature 1..16: note = Synthetic oligonucleotide
  source 1..16: mol_type = other DNA
tgagtgctctcggctt

SEQ ID NO: 1108 - DNA, 16 bp, synthetic construct
  misc_feature 1..16: note = Synthetic oligonucleotide
  source 1..16: mol_type = other DNA
gtacacggctctccac

SEQ ID NO: 1109 - DNA, 16 bp, synthetic construct
  misc_feature 1..16: note = Synthetic oligonucleotide
  source 1..16: mol_type = other DNA
cttgggcactctcaga

SEQ ID NO: 1110 - DNA, 16 bp, synthetic construct
  misc_feature 1..16: note = Synthetic oligonucleotide
  source 1..16: mol_type = other DNA
aaactccacagcattg

SEQ ID NO: 1111 - DNA, 16 bp, synthetic construct
  misc_feature 1..16: note = Synthetic oligonucleotide
  source 1..16: mol_type = other DNA
cgcccaaaaccatcaa

SEQ ID NO: 1112 - DNA, 16 bp, synthetic construct
  misc_feature 1..16: note = Synthetic oligonucleotide
  source 1..16: mol_type = other DNA
acacacaagagacctc

SEQ ID NO: 1113 - DNA, 16 bp, synthetic construct
  misc_feature 1..16: note = Synthetic oligonucleotide
  source 1..16: mol_type = other DNA
ttatggaattgcagat

SEQ ID NO: 1114 - DNA, 16 bp, synthetic construct
  misc_feature 1..16: note = Synthetic oligonucleotide
  source 1..16: mol_type = other DNA
tcaagtcagtacagag

SEQ ID NO: 1115 - DNA, 16 bp, synthetic construct
  misc_feature 1..16: note = Synthetic oligonucleotide
  source 1..16: mol_type = other DNA
cacccacacatgtttc

SEQ ID NO: 1116 - DNA, 16 bp, synthetic construct
  misc_feature 1..16: note = Synthetic oligonucleotide
  source 1..16: mol_type = other DNA
cagaatttccactatt

SEQ ID NO: 1117 - DNA, 16 bp, synthetic construct
  misc_feature 1..16: note = Synthetic oligonucleotide
  source 1..16: mol_type = other DNA
ttggttcaaaagcagc

SEQ ID NO: 1118 - DNA, 16 bp, synthetic construct
  misc_feature 1..16: note = Synthetic oligonucleotide
  source 1..16: mol_type = other DNA
ttgggtcaaacacttt

SEQ ID NO: 1119 - DNA, 16 bp, synthetic construct
  misc_feature 1..16: note = Synthetic oligonucleotide
  source 1..16: mol_type = other DNA
catgaagtgagccttc

SEQ ID NO: 1120 - DNA, 16 bp, synthetic construct
  misc_feature 1..16: note = Synthetic oligonucleotide
  source 1..16: mol_type = other DNA
gccagatgttgaagtc

SEQ ID NO: 1121 - DNA, 16 bp, synthetic construct
  misc_feature 1..16: note = Synthetic oligonucleotide
  source 1..16: mol_type = other DNA
gtcctattgtaagaac

SEQ ID NO: 1122 - DNA, 16 bp, synthetic construct
  misc_feature 1..16: note = Synthetic oligonucleotide
  source 1..16: mol_type = other DNA
actcaggtgactacat

SEQ ID NO: 1123 - DNA, 16 bp, synthetic construct
  misc_feature 1..16: note = Synthetic oligonucleotide
  source 1..16: mol_type = other DNA
gagtcattagtgctat

SEQ ID NO: 1124 - DNA, 16 bp, synthetic construct
  misc_feature 1..16: note = Synthetic oligonucleotide
  source 1..16: mol_type = other DNA
cagccattgcataaga

SEQ ID NO: 1125 - DNA, 16 bp, synthetic construct
  misc_feature 1..16: note = Synthetic oligonucleotide
  source 1..16: mol_type = other DNA
ataccgaggaattcga

SEQ ID NO: 1126 - DNA, 16 bp, synthetic construct
  misc_feature 1..16: note = Synthetic oligonucleotide
  source 1..16: mol_type = other DNA
ccacctccagttatgc

SEQ ID NO: 1127 - DNA, 16 bp, synthetic construct
  misc_feature 1..16: note = Synthetic oligonucleotide
  source 1..16: mol_type = other DNA
aaaagtgcactcatcc

SEQ ID NO: 1128 - DNA, 16 bp, synthetic construct
  misc_feature 1..16: note = Synthetic oligonucleotide
  source 1..16: mol_type = other DNA
gaggatctccagtatc

SEQ ID NO: 1129 - DNA, 16 bp, synthetic construct
  misc_feature 1..16: note = Synthetic oligonucleotide
  source 1..16: mol_type = other DNA
cttcttatgttatcct

SEQ ID NO: 1130 - DNA, 16 bp, synthetic construct
  misc_feature 1..16: note = Synthetic oligonucleotide
  source 1..16: mol_type = other DNA
tttgtggaccttctga

SEQ ID NO: 1131 - DNA, 16 bp, synthetic construct
  misc_feature 1..16: note = Synthetic oligonucleotide
  source 1..16: mol_type = other DNA
catgccgacgagggtc

SEQ ID NO: 1132 - DNA, 16 bp, synthetic construct
  misc_feature 1..16: note = Synthetic oligonucleotide
  source 1..16: mol_type = other DNA
ctgtgattcccaactc

SEQ ID NO: 1133 - DNA, 16 bp, synthetic construct
  misc_feature 1..16: note = Synthetic oligonucleotide
  source 1..16: mol_type = other DNA
gtagtccatggtactg

SEQ ID NO: 1134 - DNA, 16 bp, synthetic construct
  misc_feature 1..16: note = Synthetic oligonucleotide
  source 1..16: mol_type = other DNA
aaggcttttgatgacc

SEQ ID NO: 1135 - DNA, 16 bp, synthetic construct
  misc_feature 1..16: note = Synthetic oligonucleotide
  source 1..16: mol_type = other DNA
gatgtccttcccaatg

SEQ ID NO: 1136 - DNA, 16 bp, synthetic construct
  misc_feature 1..16: note = Synthetic oligonucleotide
  source 1..16: mol_type = other DNA
ctgaggcatgcggtac

SEQ ID NO: 1137 - DNA, 16 bp, synthetic construct
  misc_feature 1..16: note = Synthetic oligonucleotide
  source 1..16: mol_type = other DNA
aaccctctccacctgt

SEQ ID NO: 1138 - DNA, 16 bp, synthetic construct
  misc_feature 1..16: note = Synthetic oligonucleotide
  source 1..16: mol_type = other DNA
gtagactacatccagc

SEQ ID NO: 1139 - DNA, 16 bp, synthetic construct
  misc_feature 1..16: note = Synthetic oligonucleotide
  source 1..16: mol_type = other DNA
ggtccgcctgcagaat

SEQ ID NO: 1140 - DNA, 16 bp, synthetic construct
  misc_feature 1..16: note = Synthetic oligonucleotide
  source 1..16: mol_type = other DNA
gggtcaaaagcgatgg

SEQ ID NO: 1141 - DNA, 16 bp, synthetic construct
  misc_feature 1..16: note = Synthetic oligonucleotide
  source 1..16: mol_type = other DNA
agctatggaaatgcca

SEQ ID NO: 1142 - DNA, 16 bp, synthetic construct
  misc_feature 1..16: note = Synthetic oligonucleotide
  source 1..16: mol_type = other DNA
tctccagttcccattt

SEQ ID NO: 1143 - DNA, 16 bp, synthetic construct
  misc_feature 1..16: note = Synthetic oligonucleotide
  source 1..16: mol_type = other DNA
agcctcctctctattc

SEQ ID NO: 1144 - DNA, 16 bp, synthetic construct
  misc_feature 1..16: note = Synthetic oligonucleotide
  source 1..16: mol_type = other DNA
cggaggacattgaacc

SEQ ID NO: 1145 - DNA, 16 bp, synthetic construct
  misc_feature 1..16: note = Synthetic oligonucleotide
  source 1..16: mol_type = other DNA
agccgctgcctgactg

SEQ ID NO: 1146 - DNA, 16 bp, synthetic construct
  misc_feature 1..16: note = Synthetic oligonucleotide
  source 1..16: mol_type = other DNA
tcagtgttcaagcagg

SEQ ID NO: 1147 - DNA, 16 bp, synthetic construct
  misc_feature 1..16: note = Synthetic oligonucleotide
  source 1..16: mol_type = other DNA
tacttaccgggtaaga

SEQ ID NO: 1148 - DNA, 16 bp, synthetic construct
  misc_feature 1..16: note = Synthetic oligonucleotide
  source 1..16: mol_type = other DNA
cctgggcggcgacaag

SEQ ID NO: 1149 - DNA, 16 bp, synthetic construct
  misc_feature 1..16: note = Synthetic oligonucleotide
  source 1..16: mol_type = other DNA
tgaccaagcacagcaa

SEQ ID NO: 1150 - DNA, 16 bp, synthetic construct
  misc_feature 1..16: note = Synthetic oligonucleotide
  source 1..16: mol_type = other DNA
gcaccattctgcaacg

SEQ ID NO: 1151 - DNA, 16 bp, synthetic construct
  misc_feature 1..16: note = Synthetic oligonucleotide
  source 1..16: mol_type = other DNA
tctatagtttaagagc

SEQ ID NO: 1152 - DNA, 16 bp, synthetic construct
  misc_feature 1..16: note = Synthetic oligonucleotide
  source 1..16: mol_type = other DNA
tcccgcctcagggctc

SEQ ID NO: 1153 - DNA, 16 bp, synthetic construct
  misc_feature 1..16: note = Synthetic oligonucleotide
  source 1..16: mol_type = other DNA
acaccatctcatgagc

SEQ ID NO: 1154 - DNA, 16 bp, synthetic construct
  misc_feature 1..16: note = Synthetic oligonucleotide
  source 1..16: mol_type = other DNA
gtttttacaatagtgc

SEQ ID NO: 1155 - DNA, 16 bp, synthetic construct
  misc_feature 1..16: note = Synthetic oligonucleotide
  source 1..16: mol_type = other DNA
gcttgcttgagcagcc

SEQ ID NO: 1156 - DNA, 16 bp, synthetic construct
  misc_feature 1..16: note = Synthetic oligonucleotide
  source 1..16: mol_type = other DNA
gccgtgtcaccctaag

SEQ ID NO: 1157 - DNA, 16 bp, synthetic construct
  misc_feature 1..16: note = Synthetic oligonucleotide
  source 1..16: mol_type = other DNA
cccccgctgattccac

SEQ ID NO: 1158 - DNA, 16 bp, synthetic construct
  misc_feature 1..16: note = Synthetic oligonucleotide
  source 1..16: mol_type = other DNA
cctcaggtggaaacac

SEQ ID NO: 1159 - DNA, 16 bp, synthetic construct
  misc_feature 1..16: note = Synthetic oligonucleotide
  source 1..16: mol_type = other DNA
ggtccagttaagctgg

SEQ ID NO: 1160 - DNA, 16 bp, synthetic construct
  misc_feature 1..16: note = Synthetic oligonucleotide
  source 1..16: mol_type = other DNA
gccaggtagccgtgtt

SEQ ID NO: 1161 - DNA, 16 bp, synthetic construct
  misc_feature 1..16: note = Synthetic oligonucleotide
  source 1..16: mol_type = other DNA
gatgactgaactcagc

SEQ ID NO: 1162 - DNA, 16 bp, synthetic construct
  misc_feature 1..16: note = Synthetic oligonucleotide
  source 1..16: mol_type = other DNA
cctcctccagtttgct

SEQ ID NO: 1163 - DNA, 16 bp, synthetic construct
  misc_feature 1..16: note = Synthetic oligonucleotide
  source 1..16: mol_type = other DNA
taaaccttgtctccga

SEQ ID NO: 1164 - DNA, 16 bp, synthetic construct
  misc_feature 1..16: note = Synthetic oligonucleotide
  source 1..16: mol_type = other DNA
ttttgtaagtgcaacc

SEQ ID NO: 1165 - DNA, 16 bp, synthetic construct
  misc_feature 1..16: note = Synthetic oligonucleotide
  source 1..16: mol_type = other DNA
gagacctccctaaact

SEQ ID NO: 1166 - DNA, 16 bp, synthetic construct
  misc_feature 1..16: note = Synthetic oligonucleotide
  source 1..16: mol_type = other DNA
gcaaggctaagttccg

SEQ ID NO: 1167 - DNA, 16 bp, synthetic construct
  misc_feature 1..16: note = Synthetic oligonucleotide
  source 1..16: mol_type = other DNA
caaagacaagaacccc

SEQ ID NO: 1168 - DNA, 16 bp, synthetic construct
  misc_feature 1..16: note = Synthetic oligonucleotide
  source 1..16: mol_type = other DNA
acaaaactgcattgcc

SEQ ID NO: 1169 - DNA, 16 bp, synthetic construct
  misc_feature 1..16: note = Synthetic oligonucleotide
  source 1..16: mol_type = other DNA
actaaaccccacaccc

SEQ ID NO: 1170 - DNA, 16 bp, synthetic construct
  misc_feature 1..16: note = Synthetic oligonucleotide
  source 1..16: mol_type = other DNA
tgagatccaactcggc

SEQ ID NO: 1171 - DNA, 16 bp, synthetic construct
  misc_feature 1..16: note = Synthetic oligonucleotide
  source 1..16: mol_type = other DNA
ggcccacaggatcctg

SEQ ID NO: 1172 - DNA, 16 bp, synthetic construct
  misc_feature 1..16: note = Synthetic oligonucleotide
  source 1..16: mol_type = other DNA
cttctgttagatacaa

SEQ ID NO: 1173 - DNA, 16 bp, synthetic construct
  misc_feature 1..16: note = Synthetic oligonucleotide
  source 1..16: mol_type = other DNA
taaccccctgaaactg

SEQ ID NO: 1174 - DNA, 16 bp, synthetic construct
  misc_feature 1..16: note = Synthetic oligonucleotide
  source 1..16: mol_type = other DNA
attcctggacaggcaa

SEQ ID NO: 1175 - DNA, 16 bp, synthetic construct
  misc_feature 1..16: note = Synthetic oligonucleotide
  source 1..16: mol_type = other DNA
ccaggtttggatggaa

SEQ ID NO: 1176 - DNA, 16 bp, synthetic construct
  misc_feature 1..16: note = Synthetic oligonucleotide
  source 1..16: mol_type = other DNA
gggaaatgaacgcaat

SEQ ID NO: 1177 - DNA, 16 bp, synthetic construct
  misc_feature 1..16: note = Synthetic oligonucleotide
  source 1..16: mol_type = other DNA
ctgagtgctctcggct

SEQ ID NO: 1178 - DNA, 16 bp, synthetic construct
  misc_feature 1..16: note = Synthetic oligonucleotide
  source 1..16: mol_type = other DNA
ggtacacggctctcca

SEQ ID NO: 1179 - DNA, 16 bp, synthetic construct
  misc_feature 1..16: note = Synthetic oligonucleotide
  source 1..16: mol_type = other DNA
tcttgggcactctcag

SEQ ID NO: 1180 - DNA, 16 bp, synthetic construct
  misc_feature 1..16: note = Synthetic oligonucleotide
  source 1..16: mol_type = other DNA
atgtctcaaactccac

SEQ ID NO: 1181 - DNA, 16 bp, synthetic construct
  misc_feature 1..16: note = Synthetic oligonucleotide
  source 1..16: mol_type = other DNA
ccgcccaaaaccatca

SEQ ID NO: 1182 - DNA, 16 bp, synthetic construct
  misc_feature 1..16: note = Synthetic oligonucleotide
  source 1..16: mol_type = other DNA
gcacacacaagagacc

SEQ ID NO: 1183 - DNA, 16 bp, synthetic construct
  misc_feature 1..16: note = Synthetic oligonucleotide
  source 1..16: mol_type = other DNA
gaattatggaattgca

SEQ ID NO: 1184 - DNA, 16 bp, synthetic construct
  misc_feature 1..16: note = Synthetic oligonucleotide
  source 1..16: mol_type = other DNA
actcaagtcagtacag

SEQ ID NO: 1185 - DNA, 16 bp, synthetic construct
  misc_feature 1..16: note = Synthetic oligonucleotide
  source 1..16: mol_type = other DNA
gtaatcacacccacac

SEQ ID NO: 1186 - DNA, 16 bp, synthetic construct
  misc_feature 1..16: note = Synthetic oligonucleotide
  source 1..16: mol_type = other DNA
ttcagaatttccacta

SEQ ID NO: 1187 - DNA, 16 bp, synthetic construct
  misc_feature 1..16: note = Synthetic oligonucleotide
  source 1..16: mol_type = other DNA
attggttcaaaagcag

SEQ ID NO: 1188 - DNA, 16 bp, synthetic construct
  misc_feature 1..16: note = Synthetic oligonucleotide
  source 1..16: mol_type = other DNA
gttgggtcaaacactt

SEQ ID NO: 1189 - DNA, 16 bp, synthetic construct
  misc_feature 1..16: note = Synthetic oligonucleotide
  source 1..16: mol_type = other DNA
acatgaagtgagcctt

SEQ ID NO: 1190 - DNA, 16 bp, synthetic construct
  misc_feature 1..16: note = Synthetic oligonucleotide
  source 1..16: mol_type = other DNA
tttggcaccttcacct

SEQ ID NO: 1191 - DNA, 16 bp, synthetic construct
  misc_feature 1..16: note = Synthetic oligonucleotide
  source 1..16: mol_type = other DNA
ttagagggctagtgtc

SEQ ID NO: 1192 - DNA, 16 bp, synthetic construct
  misc_feature 1..16: note = Synthetic oligonucleotide
  source 1..16: mol_type = other DNA
aactcaggtgactaca

SEQ ID NO: 1193 - DNA, 16 bp, synthetic construct
  misc_feature 1..16: note = Synthetic oligonucleotide
  source 1..16: mol_type = other DNA
ggagtcattagtgcta

SEQ ID NO: 1194 - DNA, 16 bp, synthetic construct
  misc_feature 1..16: note = Synthetic oligonucleotide
  source 1..16: mol_type = other DNA
acagccattgcataag

SEQ ID NO: 1195 - DNA, 16 bp, synthetic construct
  misc_feature 1..16: note = Synthetic oligonucleotide
  source 1..16: mol_type = other DNA
tataccgaggaattcg

SEQ ID NO: 1196 - DNA, 16 bp, synthetic construct
  misc_feature 1..16: note = Synthetic oligonucleotide
  source 1..16: mol_type = other DNA
cccacctccagttatg

SEQ ID NO: 1197 - DNA, 16 bp, synthetic construct
  misc_feature 1..16: note = Synthetic oligonucleotide
  source 1..16: mol_type = other DNA
caaggaaaagtgcact

SEQ ID NO: 1198 - DNA, 16 bp, synthetic construct
  misc_feature 1..16: note = Synthetic oligonucleotide
  source 1..16: mol_type = other DNA
tgaggatctccagtat

SEQ ID NO: 1199 - DNA, 16 bp, synthetic construct
  misc_feature 1..16: note = Synthetic oligonucleotide
  source 1..16: mol_type = other DNA
ttcatgatcatttgtc

SEQ ID NO: 1200 - DNA, 16 bp, synthetic construct
  misc_feature 1..16: note = Synthetic oligonucleotide
  source 1..16: mol_type = other DNA
ccttcttatgttatcc

SEQ ID NO: 1201 - DNA, 16 bp, synthetic construct
  misc_feature 1..16: note = Synthetic oligonucleotide
  source 1..16: mol_type = other DNA
ctttgtggaccttctg

SEQ ID NO: 1202 - DNA, 16 bp, synthetic construct
  misc_feature 1..16: note = Synthetic oligonucleotide
  source 1..16: mol_type = other DNA
ccatgccgacgagggt

SEQ ID NO: 1203 - DNA, 16 bp, synthetic construct
  misc_feature 1..16: note = Synthetic oligonucleotide
  source 1..16: mol_type = other DNA
gctgtgattcccaact

SEQ ID NO: 1204 - DNA, 16 bp, synthetic construct
  misc_feature 1..16: note = Synthetic oligonucleotide
  source 1..16: mol_type = other DNA
cgtagtccatggtact

SEQ ID NO: 1205 - DNA, 16 bp, synthetic construct
  misc_feature 1..16: note = Synthetic oligonucleotide
  source 1..16: mol_type = other DNA
caaggcttttgatgac

SEQ ID NO: 1206 - DNA, 16 bp, synthetic construct
  misc_feature 1..16: note = Synthetic oligonucleotide
  source 1..16: mol_type = other DNA
ggatgtccttcccaat

SEQ ID NO: 1207 - DNA, 16 bp, synthetic construct
  misc_feature 1..16: note = Synthetic oligonucleotide
  source 1..16: mol_type = other DNA
ggctcagtgacccggg

SEQ ID NO: 1208 - DNA, 16 bp, synthetic construct
  misc_feature 1..16: note = Synthetic oligonucleotide
  source 1..16: mol_type = other DNA
attaaccctctccacc

SEQ ID NO: 1209 - DNA, 16 bp, synthetic construct
  misc_feature 1..16: note = Synthetic oligonucleotide
  source 1..16: mol_type = other DNA
ggtagactacatccag

SEQ ID NO: 1210 - DNA, 16 bp, synthetic construct
  misc_feature 1..16: note = Synthetic oligonucleotide
  source 1..16: mol_type = other DNA
tggtccgcctgcagaa

SEQ ID NO: 1211 - DNA, 16 bp, synthetic construct
  misc_feature 1..16: note = Synthetic oligonucleotide
  source 1..16: mol_type = other DNA
cagctatggaaatgcc

SEQ ID NO: 1212 - DNA, 16 bp, synthetic construct
  misc_feature 1..16: note = Synthetic oligonucleotide
  source 1..16: mol_type = other DNA
actctccagttcccat

SEQ ID NO: 1213 - DNA, 16 bp, synthetic construct
  misc_feature 1..16: note = Synthetic oligonucleotide
  source 1..16: mol_type = other DNA
caagcctcctctctat

SEQ ID NO: 1214 - DNA, 16 bp, synthetic construct
  misc_feature 1..16: note = Synthetic oligonucleotide
  source 1..16: mol_type = other DNA
ttcggaggacattgaa

SEQ ID NO: 1215 - DNA, 16 bp, synthetic construct
  misc_feature 1..16: note = Synthetic oligonucleotide
  source 1..16: mol_type = other DNA
aagccgctgcctgact

SEQ ID NO: 1216 - DNA, 16 bp, synthetic construct
  misc_feature 1..16: note = Synthetic oligonucleotide
  source 1..16: mol_type = other DNA
ttcagtgttcaagcag

SEQ ID NO: 1217 - DNA, 16 bp, synthetic construct
  misc_feature 1..16: note = Synthetic oligonucleotide
  source 1..16: mol_type = other DNA
tcctgggcggcgacaa

SEQ ID NO: 1218 - DNA, 16 bp, synthetic construct
  misc_feature 1..16: note = Synthetic oligonucleotide
  source 1..16: mol_type = other DNA
ggcaccattctgcaac

SEQ ID NO: 1219 - DNA, 16 bp, synthetic construct
  misc_feature 1..16: note = Synthetic oligonucleotide
  source 1..16: mol_type = other DNA
caaccctctatagttt

SEQ ID NO: 1220 - DNA, 16 bp, synthetic construct
  misc_feature 1..16: note = Synthetic oligonucleotide
  source 1..16: mol_type = other DNA
ggagccctccctcccg

SEQ ID NO: 1221 - DNA, 16 bp, synthetic construct
  misc_feature 1..16: note = Synthetic oligonucleotide
  source 1..16: mol_type = other DNA
tgtgtgatcccctagg

SEQ ID NO: 1222 - DNA, 16 bp, synthetic construct
  misc_feature 1..16: note = Synthetic oligonucleotide
  source 1..16: mol_type = other DNA
gccagtgtttttacaa

SEQ ID NO: 1223 - DNA, 16 bp, synthetic construct
  misc_feature 1..16: note = Synthetic oligonucleotide
  source 1..16: mol_type = other DNA
tgagccaccagtggac

SEQ ID NO: 1224 - DNA, 16 bp, synthetic construct
  misc_feature 1..16: note = Synthetic oligonucleotide
  source 1..16: mol_type = other DNA
ccccccgctgattcca

SEQ ID NO: 1225 - DNA, 16 bp, synthetic construct
  misc_feature 1..16: note = Synthetic oligonucleotide
  source 1..16: mol_type = other DNA
agcctcaggtggaaac

SEQ ID NO: 1226 - DNA, 16 bp, synthetic construct
  misc_feature 1..16: note = Synthetic oligonucleotide
  source 1..16: mol_type = other DNA
gggtccagttaagctg

SEQ ID NO: 1227 - DNA, 16 bp, synthetic construct
  misc_feature 1..16: note = Synthetic oligonucleotide
  source 1..16: mol_type = other DNA
tagatgactgaactca

SEQ ID NO: 1228 - DNA, 16 bp, synthetic construct
  misc_feature 1..16: note = Synthetic oligonucleotide
  source 1..16: mol_type = other DNA
gcctcctccagtttgc

SEQ ID NO: 1229 - DNA, 16 bp, synthetic construct
  misc_feature 1..16: note = Synthetic oligonucleotide
  source 1..16: mol_type = other DNA
gataaaccttgtctcc

SEQ ID NO: 1230 - DNA, 16 bp, synthetic construct
  misc_feature 1..16: note = Synthetic oligonucleotide
  source 1..16: mol_type = other DNA
gttttgtaagtgcaac

SEQ ID NO: 1231 - DNA, 16 bp, synthetic construct
  misc_feature 1..16: note = Synthetic oligonucleotide
  source 1..16: mol_type = other DNA
ggagacctccctaaac

SEQ ID NO: 1232 - DNA, 16 bp, synthetic construct
  misc_feature 1..16: note = Synthetic oligonucleotide
  source 1..16: mol_type = other DNA
ggcaaggctaagttcc

SEQ ID NO: 1233 - DNA, 16 bp, synthetic construct
  misc_feature 1..16: note = Synthetic oligonucleotide
  source 1..16: mol_type = other DNA
cagcaaagacaagaac

SEQ ID NO: 1234 - DNA, 16 bp, synthetic construct
  misc_feature 1..16: note = Synthetic oligonucleotide
  source 1..16: mol_type = other DNA
gtacaaaactgcattg

SEQ ID NO: 1235 - DNA, 16 bp, synthetic construct
  misc_feature 1..16: note = Synthetic oligonucleotide
  source 1..16: mol_type = other DNA
cactaaaccccacacc

SEQ ID NO: 1236 - DNA, 16 bp, synthetic construct
  misc_feature 1..16: note = Synthetic oligonucleotide
  source 1..16: mol_type = other DNA
gtgagatccaactcgg

SEQ ID NO: 1237 - DNA, 16 bp, synthetic construct
  misc_feature 1..16: note = Synthetic oligonucleotide
  source 1..16: mol_type = other DNA
tgggcccacaggatcc

SEQ ID NO: 1238 - DNA, 16 bp, synthetic construct
  misc_feature 1..16: note = Synthetic oligonucleotide
  source 1..16: mol_type = other DNA
acttctgttagataca

SEQ ID NO: 1239 - DNA, 16 bp, synthetic construct
  misc_feature 1..16: note = Synthetic oligonucleotide
  source 1..16: mol_type = other DNA
gtaaccccctgaaact

SEQ ID NO: 1240 - DNA, 16 bp, synthetic construct
  misc_feature 1..16: note = Synthetic oligonucleotide
  source 1..16: mol_type = other DNA
aacattcctggacagg

SEQ ID NO: 1241 - DNA, 16 bp, synthetic construct
  misc_feature 1..16: note = Synthetic oligonucleotide
  source 1..16: mol_type = other DNA
cccaggtttggatgga

SEQ ID NO: 1242 - DNA, 16 bp, synthetic construct
  misc_feature 1..16: note = Synthetic oligonucleotide
  source 1..16: mol_type = other DNA
agggaaatgaacgcaa

SEQ ID NO: 1243 - DNA, 16 bp, synthetic construct
  misc_feature 1..16: note = Synthetic oligonucleotide
  source 1..16: mol_type = other DNA
gctgagtgctctcggc

SEQ ID NO: 1244 - DNA, 16 bp, synthetic construct
  misc_feature 1..16: note = Synthetic oligonucleotide
  source 1..16: mol_type = other DNA
gggtacacggctctcc

SEQ ID NO: 1245 - DNA, 16 bp, synthetic construct
  misc_feature 1..16: note = Synthetic oligonucleotide
  source 1..16: mol_type = other DNA
gtcttgggcactctca

SEQ ID NO: 1246 - DNA, 16 bp, synthetic construct
  misc_feature 1..16: note = Synthetic oligonucleotide
  source 1..16: mol_type = other DNA
taatgtctcaaactcc

SEQ ID NO: 1247 - DNA, 16 bp, synthetic construct
  misc_feature 1..16: note = Synthetic oligonucleotide
  source 1..16: mol_type = other DNA
accgcccaaaaccatc

SEQ ID NO: 1248 - DNA, 16 bp, synthetic construct
  misc_feature 1..16: note = Synthetic oligonucleotide
  source 1..16: mol_type = other DNA
tgcacacacaagagac

SEQ ID NO: 1249 - DNA, 16 bp, synthetic construct
  misc_feature 1..16: note = Synthetic oligonucleotide
  source 1..16: mol_type = other DNA
ggaattatggaattgc

SEQ ID NO: 1250 - DNA, 16 bp, synthetic construct
  misc_feature 1..16: note = Synthetic oligonucleotide
  source 1..16: mol_type = other DNA
aactcaagtcagtaca

SEQ ID NO: 1251 - DNA, 16 bp, synthetic construct
  misc_feature 1..16: note = Synthetic oligonucleotide
  source 1..16: mol_type = other DNA
ccctgtaatcacaccc

SEQ ID NO: 1252 - DNA, 16 bp, synthetic construct
  misc_feature 1..16: note = Synthetic oligonucleotide
  source 1..16: mol_type = other DNA
tattggttcaaaagca

SEQ ID NO: 1253 - DNA, 16 bp, synthetic construct
  misc_feature 1..16: note = Synthetic oligonucleotide
  source 1..16: mol_type = other DNA
ctgttgggtcaaacac

SEQ ID NO: 1254 - DNA, 16 bp, synthetic construct
  misc_feature 1..16: note = Synthetic oligonucleotide
  source 1..16: mol_type = other DNA
aacatgaagtgagcct

SEQ ID NO: 1255 - DNA, 16 bp, synthetic construct
  misc_feature 1..16: note = Synthetic oligonucleotide
  source 1..16: mol_type = other DNA
ttttggcaccttcacc

SEQ ID NO: 1256 - DNA, 16 bp, synthetic construct
  misc_feature 1..16: note = Synthetic oligonucleotide
  source 1..16: mol_type = other DNA
attagagggctagtgt

SEQ ID NO: 1257 - DNA, 16 bp, synthetic construct
  misc_feature 1..16: note = Synthetic oligonucleotide
  source 1..16: mol_type = other DNA
aaactcaggtgactac

SEQ ID NO: 1258 - DNA, 16 bp, synthetic construct
  misc_feature 1..16: note = Synthetic oligonucleotide
  source 1..16: mol_type = other DNA
tggagtcattagtgct

SEQ ID NO: 1259 - DNA, 16 bp, synthetic construct
  misc_feature 1..16: note = Synthetic oligonucleotide
  source 1..16: mol_type = other DNA
aacagccattgcataa

SEQ ID NO: 1260 - DNA, 16 bp, synthetic construct
  misc_feature 1..16: note = Synthetic oligonucleotide
  source 1..16: mol_type = other DNA
caagatataccgagga

SEQ ID NO: 1261 - DNA, 16 bp, synthetic construct
  misc_feature 1..16: note = Synthetic oligonucleotide
  source 1..16: mol_type = other DNA
ttcccctggcagagac

SEQ ID NO: 1262 - DNA, 16 bp, synthetic construct
  misc_feature 1..16: note = Synthetic oligonucleotide
  source 1..16: mol_type = other DNA
ccctcgctccagcttc

SEQ ID NO: 1263 - DNA, 16 bp, synthetic construct
  misc_feature 1..16: note = Synthetic oligonucleotide
  source 1..16: mol_type = other DNA
cttactttgaggatct

SEQ ID NO: 1264 - DNA, 16 bp, synthetic construct
  misc_feature 1..16: note = Synthetic oligonucleotide
  source 1..16: mol_type = other DNA
tactgctggcctttat

SEQ ID NO: 1265 - DNA, 16 bp, synthetic construct
  misc_feature 1..16: note = Synthetic oligonucleotide
  source 1..16: mol_type = other DNA
cggagccttcttatgt

SEQ ID NO: 1266 - DNA, 16 bp, synthetic construct
  misc_feature 1..16: note = Synthetic oligonucleotide
  source 1..16: mol_type = other DNA
tggtgcctttgtggac

SEQ ID NO: 1267 - DNA, 16 bp, synthetic construct
  misc_feature 1..16: note = Synthetic oligonucleotide
  source 1..16: mol_type = other DNA
cagacccatgccgacg

SEQ ID NO: 1268 - DNA, 16 bp, synthetic construct
  misc_feature 1..16: note = Synthetic oligonucleotide
  source 1..16: mol_type = other DNA
aagcggctgtgattcc

SEQ ID NO: 1269 - DNA, 16 bp, synthetic construct
  misc_feature 1..16: note = Synthetic oligonucleotide
  source 1..16: mol_type = other DNA
tctttccgtagtccat

SEQ ID NO: 1270 - DNA, 16 bp, synthetic construct
  misc_feature 1..16: note = Synthetic oligonucleotide
  source 1..16: mol_type = other DNA
cacccaaaaactccct

SEQ ID NO: 1271 - DNA, 16 bp, synthetic construct
  misc_feature 1..16: note = Synthetic oligonucleotide
  source 1..16: mol_type = other DNA
ggcacggatgtccttc

SEQ ID NO: 1272 - DNA, 16 bp, synthetic construct
  misc_feature 1..16: note = Synthetic oligonucleotide
  source 1..16: mol_type = other DNA
agattggctcagtgac

SEQ ID NO: 1273 - DNA, 16 bp, synthetic construct
  misc_feature 1..16: note = Synthetic oligonucleotide
  source 1..16: mol_type = other DNA
ctgggttcattaaccc

SEQ ID NO: 1274 - DNA, 16 bp, synthetic construct
  misc_feature 1..16: note = Synthetic oligonucleotide
  source 1..16: mol_type = other DNA
cacgaggtagactaca

SEQ ID NO: 1275 - DNA, 16 bp, synthetic construct
  misc_feature 1..16: note = Synthetic oligonucleotide
  source 1..16: mol_type = other DNA
gttcttggtccgcctg

SEQ ID NO: 1276 - DNA, 16 bp, synthetic construct
  misc_feature 1..16: note = Synthetic oligonucleotide
  source 1..16: mol_type = other DNA
accctctttatccccc

SEQ ID NO: 1277 - DNA, 16 bp, synthetic construct
  misc_feature 1..16: note = Synthetic oligonucleotide
  source 1..16: mol_type = other DNA
tgtgctcagctatgga

SEQ ID NO: 1278 - DNA, 16 bp, synthetic construct
  misc_feature 1..16: note = Synthetic oligonucleotide
  source 1..16: mol_type = other DNA
ttagtctaaagtaaac

SEQ ID NO: 1279 - DNA, 16 bp, synthetic construct
  misc_feature 1..16: note = Synthetic oligonucleotide
  source 1..16: mol_type = other DNA
tgctggttccttcaag

SEQ ID NO: 1280 - DNA, 16 bp, synthetic construct
  misc_feature 1..16: note = Synthetic oligonucleotide
  source 1..16: mol_type = other DNA
tcattcttcggaggac

SEQ ID NO: 1281 - DNA, 16 bp, synthetic construct
  misc_feature 1..16: note = Synthetic oligonucleotide
  source 1..16: mol_type = other DNA
atcaggaagccgctgc

SEQ ID NO: 1282 - DNA, 16 bp, synthetic construct
  misc_feature 1..16: note = Synthetic oligonucleotide
  source 1..16: mol_type = other DNA
atggcccaccacctgc

SEQ ID NO: 1283 - DNA, 16 bp, synthetic construct
  misc_feature 1..16: note = Synthetic oligonucleotide
  source 1..16: mol_type = other DNA
gctaattttctgactg

SEQ ID NO: 1284 - DNA, 16 bp, synthetic construct
  misc_feature 1..16: note = Synthetic oligonucleotide
  source 1..16: mol_type = other DNA
gtcaatcctgggcggc

SEQ ID NO: 1285 - DNA, 16 bp, synthetic construct
  misc_feature 1..16: note = Synthetic oligonucleotide
  source 1..16: mol_type = other DNA
tcatgattgcaaagct

SEQ ID NO: 1286 - DNA, 16 bp, synthetic construct
  misc_feature 1..16: note = Synthetic oligonucleotide
  source 1..16: mol_type = other DNA
agctttgtgaacccat

SEQ ID NO: 1287 - DNA, 16 bp, synthetic construct
  misc_feature 1..16: note = Synthetic oligonucleotide
  source 1..16: mol_type = other DNA
gcccaagcccagtcca

SEQ ID NO: 1288 - DNA, 16 bp, synthetic construct
  misc_feature 1..16: note = Synthetic oligonucleotide
  source 1..16: mol_type = other DNA
agggtatatgaaagtt

SEQ ID NO: 1289 - DNA, 16 bp, synthetic construct
  misc_feature 1..16: note = Synthetic oligonucleotide
  source 1..16: mol_type = other DNA
agccagtgtgtattgc

SEQ ID NO: 1290 - DNA, 16 bp, synthetic construct
  misc_feature 1..16: note = Synthetic oligonucleotide
  source 1..16: mol_type = other DNA
ttgcacccttgaggag

SEQ ID NO: 1291 - DNA, 16 bp, synthetic construct
  misc_feature 1..16: note = Synthetic oligonucleotide
  source 1..16: mol_type = other DNA
gctaggtgccagggta

SEQ ID NO: 1292 - DNA, 16 bp, synthetic construct
  misc_feature 1..16: note = Synthetic oligonucleotide
  source 1..16: mol_type = other DNA
cccccccccccgctga

SEQ ID NO: 1293 - DNA, 16 bp, synthetic construct
  misc_feature 1..16: note = Synthetic oligonucleotide
  source 1..16: mol_type = other DNA
acattcccacagggcc

SEQ ID NO: 1294 - DNA, 16 bp, synthetic construct
  misc_feature 1..16: note = Synthetic oligonucleotide
  source 1..16: mol_type = other DNA
ggatgtggcaaaggac

SEQ ID NO: 1295 - DNA, 16 bp, synthetic construct
  misc_feature 1..16: note = Synthetic oligonucleotide
  source 1..16: mol_type = other DNA
gccctattgtgtggca

SEQ ID NO: 1296 - DNA, 16 bp, synthetic construct
  misc_feature 1..16: note = Synthetic oligonucleotide
  source 1..16: mol_type = other DNA
atttttctttgaccgg

SEQ ID NO: 1297 - DNA, 16 bp, synthetic construct
  misc_feature 1..16: note = Synthetic oligonucleotide
  source 1..16: mol_type = other DNA
acgaagcctcctccag

SEQ ID NO: 1298 - DNA, 16 bp, synthetic construct
  misc_feature 1..16: note = Synthetic oligonucleotide
  source 1..16: mol_type = other DNA
tcacccgataaacctt

SEQ ID NO: 1299 - DNA, 16 bp, synthetic construct
  misc_feature 1..16: note = Synthetic oligonucleotide
  source 1..16: mol_type = other DNA
cccaaacaggcagttt

SEQ ID NO: 1300 - DNA, 16 bp, synthetic construct
  misc_feature 1..16: note = Synthetic oligonucleotide
  source 1..16: mol_type = other DNA
tattcggagacctccc

SEQ ID NO: 1301 - DNA, 16 bp, synthetic construct
  misc_feature 1..16: note = Synthetic oligonucleotide
  source 1..16: mol_type = other DNA
acctgggcaaggctaa

SEQ ID NO: 1302 - DNA, 16 bp, synthetic construct
  misc_feature 1..16: note = Synthetic oligonucleotide
  source 1..16: mol_type = other DNA
cttactccacacctta

SEQ ID NO: 1303 - DNA, 16 bp, synthetic construct
  misc_feature 1..16: note = Synthetic oligonucleotide
  source 1..16: mol_type = other DNA
gtttggtacaaaactg

SEQ ID NO: 1304 - DNA, 16 bp, synthetic construct
  misc_feature 1..16: note = Synthetic oligonucleotide
  source 1..16: mol_type = other DNA
ttgtctcactaaaccc

SEQ ID NO: 1305 - DNA, 16 bp, synthetic construct
  misc_feature 1..16: note = Synthetic oligonucleotide
  source 1..16: mol_type = other DNA
aagaccagtgagatcc

SEQ ID NO: 1306 - DNA, 16 bp, synthetic construct
  misc_feature 1..16: note = Synthetic oligonucleotide
  source 1..16: mol_type = other DNA
aaccacctgtagggac

SEQ ID NO: 1307 - DNA, 16 bp, synthetic construct
  misc_feature 1..16: note = Synthetic oligonucleotide
  source 1..16: mol_type = other DNA
tgggtacttctgttag

SEQ ID NO: 1308 - DNA, 16 bp, synthetic construct
  misc_feature 1..16: note = Synthetic oligonucleotide
  source 1..16: mol_type = other DNA
acagctgtaaccccct

SEQ ID NO: 1309 - DNA, 16 bp, synthetic construct
  misc_feature 1..16: note = Synthetic oligonucleotide
  source 1..16: mol_type = other DNA
tggtggatataaaagc

SEQ ID NO: 1310 - DNA, 16 bp, synthetic construct
  misc_feature 1..16: note = Synthetic oligonucleotide
  source 1..16: mol_type = other DNA
agcgattgtcttgttt

SEQ ID NO: 1311 - DNA, 16 bp, synthetic construct
  misc_feature 1..16: note = Synthetic oligonucleotide
  source 1..16: mol_type = other DNA
tgccgtggcaactctg

SEQ ID NO: 1312 - DNA, 16 bp, synthetic construct
  misc_feature 1..16: note = Synthetic oligonucleotide
  source 1..16: mol_type = other DNA
gtttttcctcagtccc

SEQ ID NO: 1313 - DNA, 16 bp, synthetic construct
  misc_feature 1..16: note = Synthetic oligonucleotide
  source 1..16: mol_type = other DNA
ggcacctccatgttgc

SEQ ID NO: 1314 - DNA, 16 bp, synthetic construct
  misc_feature 1..16: note = Synthetic oligonucleotide
  source 1..16: mol_type = other DNA
tgctggtcttgggcac

SEQ ID NO: 1315 - DNA, 16 bp, synthetic construct
  misc_feature 1..16: note = Synthetic oligonucleotide
  source 1..16: mol_type = other DNA
ccttatagcttacctg

SEQ ID NO: 1316 - DNA, 16 bp, synthetic construct
  misc_feature 1..16: note = Synthetic oligonucleotide
  source 1..16: mol_type = other DNA
agagtcaccgcccaaa

SEQ ID NO: 1317 - DNA, 16 bp, synthetic construct
  misc_feature 1..16: note = Synthetic oligonucleotide
  source 1..16: mol_type = other DNA
cttgccgtgcacacac

SEQ ID NO: 1318 - DNA, 16 bp, synthetic construct
  misc_feature 1..16: note = Synthetic oligonucleotide
  source 1..16: mol_type = other DNA
tggtttgcagggatct

SEQ ID NO: 1319 - DNA, 16 bp, synthetic construct
  misc_feature 1..16: note = Synthetic oligonucleotide
  source 1..16: mol_type = other DNA
acaaagaactcaagtc

SEQ ID NO: 1320 - DNA, 16 bp, synthetic construct
  misc_feature 1..16: note = Synthetic oligonucleotide
  source 1..16: mol_type = other DNA
gactgctccctgtaat

SEQ ID NO: 1321 - DNA, 16 bp, synthetic construct
  misc_feature 1..16: note = Synthetic oligonucleotide
  source 1..16: mol_type = other DNA
atgtgtttaggcattc

SEQ ID NO: 1322 - DNA, 16 bp, synthetic construct
  misc_feature 1..16: note = Synthetic oligonucleotide
  source 1..16: mol_type = other DNA
cattgggttatgaaat

SEQ ID NO: 1323 - DNA, 16 bp, synthetic construct
  misc_feature 1..16: note = Synthetic oligonucleotide
  source 1..16: mol_type = other DNA
catgcctgttgggtca

SEQ ID NO: 1324 - DNA, 16 bp, synthetic construct
  misc_feature 1..16: note = Synthetic oligonucleotide
  source 1..16: mol_type = other DNA
gctcagcaccaacatg

SEQ ID NO: 1325 - DNA, 16 bp, synthetic construct
  misc_feature 1..16: note = Synthetic oligonucleotide
  source 1..16: mol_type = other DNA
actccaacccttttgg

SEQ ID NO: 1326 - DNA, 16 bp, synthetic construct
  misc_feature 1..16: note = Synthetic oligonucleotide
  source 1..16: mol_type = other DNA
attctattagagggct

SEQ ID NO: 1327 - DNA, 16 bp, synthetic construct
  misc_feature 1..16: note = Synthetic oligonucleotide
  source 1..16: mol_type = other DNA
aagctttaaactcagg

SEQ ID NO: 1328 - DNA, 16 bp, synthetic construct
  misc_feature 1..16: note = Synthetic oligonucleotide
  source 1..16: mol_type = other DNA
cttgttttatggagtc

SEQ ID NO: 1329 - DNA, 16 bp, synthetic construct
  misc_feature 1..16: note = Synthetic oligonucleotide
  source 1..16: mol_type = other DNA
agtgcataacagccat

SEQ ID NO: 1330 - DNA, 16 bp, synthetic construct
  misc_feature 1..16: note = Synthetic oligonucleotide
  source 1..16: mol_type = other DNA
ccaagatataccgagg

SEQ ID NO: 1331 - DNA, 16 bp, synthetic construct
  misc_feature 1..16: note = Synthetic oligonucleotide
  source 1..16: mol_type = other DNA
aatcttcccctggcag

SEQ ID NO: 1332 - DNA, 16 bp, synthetic construct
  misc_feature 1..16: note = Synthetic oligonucleotide
  source 1..16: mol_type = other DNA
accctcgctccagctt

SEQ ID NO: 1333 - DNA, 16 bp, synthetic construct
  misc_feature 1..16: note = Synthetic oligonucleotide
  source 1..16: mol_type = other DNA
gggcttactttgagga

SEQ ID NO: 1334 - DNA, 16 bp, synthetic construct
  misc_feature 1..16: note = Synthetic oligonucleotide
  source 1..16: mol_type = other DNA
gtactgctggccttta

SEQ ID NO: 1335 - DNA, 16 bp, synthetic construct
  misc_feature 1..16: note = Synthetic oligonucleotide
  source 1..16: mol_type = other DNA
acggagccttcttatg

SEQ ID NO: 1336 - DNA, 16 bp, synthetic construct
  misc_feature 1..16: note = Synthetic oligonucleotide
  source 1..16: mol_type = other DNA
gtggtgcctttgtgga

SEQ ID NO: 1337 - DNA, 16 bp, synthetic construct
  misc_feature 1..16: note = Synthetic oligonucleotide
  source 1..16: mol_type = other DNA
ccagacccatgccgac

SEQ ID NO: 1338 - DNA, 16 bp, synthetic construct
  misc_feature 1..16: note = Synthetic oligonucleotide
  source 1..16: mol_type = other DNA
aaagcggctgtgattc

SEQ ID NO: 1339 - DNA, 16 bp, synthetic construct
  misc_feature 1..16: note = Synthetic oligonucleotide
  source 1..16: mol_type = other DNA
ttctttccgtagtcca

SEQ ID NO: 1340 - DNA, 16 bp, synthetic construct
  misc_feature 1..16: note = Synthetic oligonucleotide
  source 1..16: mol_type = other DNA
tcacccaaaaactccc

SEQ ID NO: 1341 - DNA, 16 bp, synthetic construct
  misc_feature 1..16: note = Synthetic oligonucleotide
  source 1..16: mol_type = other DNA
agggcacggatgtcct

SEQ ID NO: 1342 - DNA, 16 bp, synthetic construct
  misc_feature 1..16: note = Synthetic oligonucleotide
  source 1..16: mol_type = other DNA
gagattggctcagtga

SEQ ID NO: 1343 - DNA, 16 bp, synthetic construct
  misc_feature 1..16: note = Synthetic oligonucleotide
  source 1..16: mol_type = other DNA
gctgggttcattaacc

SEQ ID NO: 1344 - DNA, 16 bp, synthetic construct
  misc_feature 1..16: note = Synthetic oligonucleotide
  source 1..16: mol_type = other DNA
taagtgctttgattcg

SEQ ID NO: 1345 - DNA, 16 bp, synthetic construct
  misc_feature 1..16: note = Synthetic oligonucleotide
  source 1..16: mol_type = other DNA
agttcttggtccgcct

SEQ ID NO: 1346 - DNA, 16 bp, synthetic construct
  misc_feature 1..16: note = Synthetic oligonucleotide
  source 1..16: mol_type = other DNA
caccctctttatcccc

SEQ ID NO: 1347 - DNA, 16 bp, synthetic construct
  misc_feature 1..16: note = Synthetic oligonucleotide
  source 1..16: mol_type = other DNA
ctgtgctcagctatgg

SEQ ID NO: 1348 - DNA, 16 bp, synthetic construct
  misc_feature 1..16: note = Synthetic oligonucleotide
  source 1..16: mol_type = other DNA
ctttagtctaaagtaa

SEQ ID NO: 1349 - DNA, 16 bp, synthetic construct
  misc_feature 1..16: note = Synthetic oligonucleotide
  source 1..16: mol_type = other DNA
actcttgggctttctc

SEQ ID NO: 1350 - DNA, 16 bp, synthetic construct
  misc_feature 1..16: note = Synthetic oligonucleotide
  source 1..16: mol_type = other DNA
ttcattcttcggagga

SEQ ID NO: 1351 - DNA, 16 bp, synthetic construct
  misc_feature 1..16: note = Synthetic oligonucleotide
  source 1..16: mol_type = other DNA
catcaggaagccgctg

SEQ ID NO: 1352 - DNA, 16 bp, synthetic construct
  misc_feature 1..16: note = Synthetic oligonucleotide
  source 1..16: mol_type = other DNA
gccatggcccaccacc

SEQ ID NO: 1353 - DNA, 16 bp, synthetic construct
  misc_feature 1..16: note = Synthetic oligonucleotide
  source 1..16: mol_type = other DNA
gctttcatgctaattt

SEQ ID NO: 1354 - DNA, 16 bp, synthetic construct
  misc_feature 1..16: note = Synthetic oligonucleotide
  source 1..16: mol_type = other DNA
ggtcaatcctgggcgg

SEQ ID NO: 1355 - DNA, 16 bp, synthetic construct
  misc_feature 1..16: note = Synthetic oligonucleotide
  source 1..16: mol_type = other DNA
ctcatgattgcaaagc

SEQ ID NO: 1356 - DNA, 16 bp, synthetic construct
  misc_feature 1..16: note = Synthetic oligonucleotide
  source 1..16: mol_type = other DNA
ctcagcagtcaaaacc

SEQ ID NO: 1357 - DNA, 16 bp, synthetic construct
  misc_feature 1..16: note = Synthetic oligonucleotide
  source 1..16: mol_type = other DNA
gttcctagaagaagcc

SEQ ID NO: 1358 - DNA, 16 bp, synthetic construct
  misc_feature 1..16: note = Synthetic oligonucleotide
  source 1..16: mol_type = other DNA
gagggtatatgaaagt

SEQ ID NO: 1359 - DNA, 16 bp, synthetic construct
  misc_feature 1..16: note = Synthetic oligonucleotide
  source 1..16: mol_type = other DNA
tagctggtgatagcca

SEQ ID NO: 1360 - DNA, 16 bp, synthetic construct
  misc_feature 1..16: note = Synthetic oligonucleotide
  source 1..16: mol_type = other DNA
tgttgcacccttgagg

SEQ ID NO: 1361 - DNA, 16 bp, synthetic construct
  misc_feature 1..16: note = Synthetic oligonucleotide
  source 1..16: mol_type = other DNA
tcatttgctaggtgcc

SEQ ID NO: 1362 - DNA, 16 bp, synthetic construct
  misc_feature 1..16: note = Synthetic oligonucleotide
  source 1..16: mol_type = other DNA
ggtcaacctcctctcc

SEQ ID NO: 1363 - DNA, 16 bp, synthetic construct
  misc_feature 1..16: note = Synthetic oligonucleotide
  source 1..16: mol_type = other DNA
tacattcccacagggc

SEQ ID NO: 1364 - DNA, 16 bp, synthetic construct
  misc_feature 1..16: note = Synthetic oligonucleotide
  source 1..16: mol_type = other DNA
cgccaggtcacacaga

SEQ ID NO: 1365 - DNA, 16 bp, synthetic construct
  misc_feature 1..16: note = Synthetic oligonucleotide
  source 1..16: mol_type = other DNA
ggccctattgtgtggc

SEQ ID NO: 1366 - DNA, 16 bp, synthetic construct
  misc_feature 1..16: note = Synthetic oligonucleotide
  source 1..16: mol_type = other DNA
gatttttctttgaccg

SEQ ID NO: 1367 - DNA, 16 bp, synthetic construct
  misc_feature 1..16: note = Synthetic oligonucleotide
  source 1..16: mol_type = other DNA
cacgaagcctcctcca

SEQ ID NO: 1368 - DNA, 16 bp, synthetic construct
  misc_feature 1..16: note = Synthetic oligonucleotide
  source 1..16: mol_type = other DNA
ttcacccgataaacct

SEQ ID NO: 1369 - DNA, 16 bp, synthetic construct
  misc_feature 1..16: note = Synthetic oligonucleotide
  source 1..16: mol_type = other DNA
acccaaacaggcagtt

SEQ ID NO: 1370 - DNA, 16 bp, synthetic construct
  misc_feature 1..16: note = Synthetic oligonucleotide
  source 1..16: mol_type = other DNA
gtattcggagacctcc

SEQ ID NO: 1371 - DNA, 16 bp, synthetic construct
  misc_feature 1..16: note = Synthetic oligonucleotide
  source 1..16: mol_type = other DNA
aacctgggcaaggcta

SEQ ID NO: 1372 - DNA, 16 bp, synthetic construct
  misc_feature 1..16: note = Synthetic oligonucleotide
  source 1..16: mol_type = other DNA
tgcttactccacacct

SEQ ID NO: 1373 - DNA, 16 bp, synthetic construct
  misc_feature 1..16: note = Synthetic oligonucleotide
  source 1..16: mol_type = other DNA
ccatgtttggtacaaa

SEQ ID NO: 1374 - DNA, 16 bp, synthetic construct
  misc_feature 1..16: note = Synthetic oligonucleotide
  source 1..16: mol_type = other DNA
cttgtctcactaaacc

SEQ ID NO: 1375 - DNA, 16 bp, synthetic construct
  misc_feature 1..16: note = Synthetic oligonucleotide
  source 1..16: mol_type = other DNA
taagaccagtgagatc

SEQ ID NO: 1376 - DNA, 16 bp, synthetic construct
  misc_feature 1..16: note = Synthetic oligonucleotide
  source 1..16: mol_type = other DNA
aaaccacctgtaggga

SEQ ID NO: 1377 - DNA, 16 bp, synthetic construct
  misc_feature 1..16: note = Synthetic oligonucleotide
  source 1..16: mol_type = other DNA
atgggtacttctgtta

SEQ ID NO: 1378 - DNA, 16 bp, synthetic construct
  misc_feature 1..16: note = Synthetic oligonucleotide
  source 1..16: mol_type = other DNA
tagaacagctgtaacc

SEQ ID NO: 1379 - DNA, 16 bp, synthetic construct
  misc_feature 1..16: note = Synthetic oligonucleotide
  source 1..16: mol_type = other DNA
gctggtggatataaaa

SEQ ID NO: 1380 - DNA, 16 bp, synthetic construct
  misc_feature 1..16: note = Synthetic oligonucleotide
  source 1..16: mol_type = other DNA
gagcgattgtcttgtt

SEQ ID NO: 1381 - DNA, 16 bp, synthetic construct
  misc_feature 1..16: note = Synthetic oligonucleotide
  source 1..16: mol_type = other DNA
ttgccgtggcaactct

SEQ ID NO: 1382 - DNA, 16 bp, synthetic construct
  misc_feature 1..16: note = Synthetic oligonucleotide
  source 1..16: mol_type = other DNA
agtttttcctcagtcc

SEQ ID NO: 1383 - DNA, 16 bp, synthetic construct
  misc_feature 1..16: note = Synthetic oligonucleotide
  source 1..16: mol_type = other DNA
aggcacctccatgttg

SEQ ID NO: 1384 - DNA, 16 bp, synthetic construct
  misc_feature 1..16: note = Synthetic oligonucleotide
  source 1..16: mol_type = other DNA
ggagattcctcctgct

SEQ ID NO: 1385 - DNA, 16 bp, synthetic construct
  misc_feature 1..16: note = Synthetic oligonucleotide
  source 1..16: mol_type = other DNA
cccttatagcttacct

SEQ ID NO: 1386 - DNA, 16 bp, synthetic construct
  misc_feature 1..16: note = Synthetic oligonucleotide
  source 1..16: mol_type = other DNA
gagagtcaccgcccaa

SEQ ID NO: 1387 - DNA, 16 bp, synthetic construct
  misc_feature 1..16: note = Synthetic oligonucleotide
  source 1..16: mol_type = other DNA
tcttgccgtgcacaca

SEQ ID NO: 1388 - DNA, 16 bp, synthetic construct
  misc_feature 1..16: note = Synthetic oligonucleotide
  source 1..16: mol_type = other DNA
gtggtttgcagggatc

SEQ ID NO: 1389 - DNA, 16 bp, synthetic construct
  misc_feature 1..16: note = Synthetic oligonucleotide
  source 1..16: mol_type = other DNA
ggtctacaaagaactc

SEQ ID NO: 1390 - DNA, 16 bp, synthetic construct
  misc_feature 1..16: note = Synthetic oligonucleotide
  source 1..16: mol_type = other DNA
ggactgctccctgtaa

SEQ ID NO: 1391 - DNA, 16 bp, synthetic construct
  misc_feature 1..16: note = Synthetic oligonucleotide
  source 1..16: mol_type = other DNA
gatgtgtttaggcatt

SEQ ID NO: 1392 - DNA, 16 bp, synthetic construct
  misc_feature 1..16: note = Synthetic oligonucleotide
  source 1..16: mol_type = other DNA
atcattgggttatgaa

SEQ ID NO: 1393 - DNA, 16 bp, synthetic construct
  misc_feature 1..16: note = Synthetic oligonucleotide
  source 1..16: mol_type = other DNA
acatgcctgttgggtc

SEQ ID NO: 1394 - DNA, 16 bp, synthetic construct
  misc_feature 1..16: note = Synthetic oligonucleotide
  source 1..16: mol_type = other DNA
agctcagcaccaacat

SEQ ID NO: 1395 - DNA, 16 bp, synthetic construct
  misc_feature 1..16: note = Synthetic oligonucleotide
  source 1..16: mol_type = other DNA
gactccaacccttttg

SEQ ID NO: 1396 - DNA, 16 bp, synthetic construct
  misc_feature 1..16: note = Synthetic oligonucleotide
  source 1..16: mol_type = other DNA
aattctattagagggc

SEQ ID NO: 1397 - DNA, 16 bp, synthetic construct
  misc_feature 1..16: note = Synthetic oligonucleotide
  source 1..16: mol_type = other DNA
gaagctttaaactcag

SEQ ID NO: 1398 - DNA, 16 bp, synthetic construct
  misc_feature 1..16: note = Synthetic oligonucleotide
  source 1..16: mol_type = other DNA
acttgttttatggagt

SEQ ID NO: 1399 - DNA, 16 bp, synthetic construct
  misc_feature 1..16: note = Synthetic oligonucleotide
  source 1..16: mol_type = other DNA
gagtgcataacagcca

SEQ ID NO: 1400 - DNA, 16 bp, synthetic construct
  misc_feature 1..16: note = Synthetic oligonucleotide
  source 1..16: mol_type = other DNA
acaggtcctccagtcc

SEQ ID NO: 1401 - DNA, 16 bp, synthetic construct
  misc_feature 1..16: note = Synthetic oligonucleotide
  source 1..16: mol_type = other DNA
tgtcgctgcagggcct

SEQ ID NO: 1402 - DNA, 16 bp, synthetic construct
  misc_feature 1..16: note = Synthetic oligonucleotide
  source 1..16: mol_type = other DNA
ttttgttgcaccctcg

SEQ ID NO: 1403 - DNA, 16 bp, synthetic construct
  misc_feature 1..16: note = Synthetic oligonucleotide
  source 1..16: mol_type = other DNA
tgctctctgggtccat

SEQ ID NO: 1404 - DNA, 16 bp, synthetic construct
  misc_feature 1..16: note = Synthetic oligonucleotide
  source 1..16: mol_type = other DNA
ccagtttctgtactgc

SEQ ID NO: 1405 - DNA, 16 bp, synthetic construct
  misc_feature 1..16: note = Synthetic oligonucleotide
  source 1..16: mol_type = other DNA
atctgcaagggcacgg

SEQ ID NO: 1406 - DNA, 16 bp, synthetic construct
  misc_feature 1..16: note = Synthetic oligonucleotide
  source 1..16: mol_type = other DNA
ttggcgatggtggtgc

SEQ ID NO: 1407 - DNA, 16 bp, synthetic construct
  misc_feature 1..16: note = Synthetic oligonucleotide
  source 1..16: mol_type = other DNA
ccctctgtgaagggtg

SEQ ID NO: 1408 - DNA, 16 bp, synthetic construct
  misc_feature 1..16: note = Synthetic oligonucleotide
  source 1..16: mol_type = other DNA
gtaatcccggtcaaag

SEQ ID NO: 1409 - DNA, 16 bp, synthetic construct
  misc_feature 1..16: note = Synthetic oligonucleotide
  source 1..16: mol_type = other DNA
gtgtccaccacttctt

SEQ ID NO: 1410 - DNA, 16 bp, synthetic construct
  misc_feature 1..16: note = Synthetic oligonucleotide
  source 1..16: mol_type = other DNA
gtattgccagctaagg

SEQ ID NO: 1411 - DNA, 16 bp, synthetic construct
  misc_feature 1..16: note = Synthetic oligonucleotide
  source 1..16: mol_type = other DNA
aagattggctctggct

SEQ ID NO: 1412 - DNA, 16 bp, synthetic construct
  misc_feature 1..16: note = Synthetic oligonucleotide
  source 1..16: mol_type = other DNA
ccgctttcagctgaga

SEQ ID NO: 1413 - DNA, 16 bp, synthetic construct
  misc_feature 1..16: note = Synthetic oligonucleotide
  source 1..16: mol_type = other DNA
gagcttgactcctctg

SEQ ID NO: 1414 - DNA, 16 bp, synthetic construct
  misc_feature 1..16: note = Synthetic oligonucleotide
  source 1..16: mol_type = other DNA
gccccctcatgtaagt

SEQ ID NO: 1415 - DNA, 16 bp, synthetic construct
  misc_feature 1..16: note = Synthetic oligonucleotide
  source 1..16: mol_type = other DNA
atatctctcctggtgg

SEQ ID NO: 1416 - DNA, 16 bp, synthetic construct
  misc_feature 1..16: note = Synthetic oligonucleotide
  source 1..16: mol_type = other DNA
ataaactttacctcac

SEQ ID NO: 1417 - DNA, 16 bp, synthetic construct
  misc_feature 1..16: note = Synthetic oligonucleotide
  source 1..16: mol_type = other DNA
cttctccttgctgcac

SEQ ID NO: 1418 - DNA, 16 bp, synthetic construct
  misc_feature 1..16: note = Synthetic oligonucleotide
  source 1..16: mol_type = other DNA
cacccggccccccaat

SEQ ID NO: 1419 - DNA, 16 bp, synthetic construct
  misc_feature 1..16: note = Synthetic oligonucleotide
  source 1..16: mol_type = other DNA
atccaactgttctaac

SEQ ID NO: 1420 - DNA, 16 bp, synthetic construct
  misc_feature 1..16: note = Synthetic oligonucleotide
  source 1..16: mol_type = other DNA
atatgcccccaggagg

SEQ ID NO: 1421 - DNA, 16 bp, synthetic construct
  misc_feature 1..16: note = Synthetic oligonucleotide
  source 1..16: mol_type = other DNA
caccccaatgaccatc

SEQ ID NO: 1422 - DNA, 16 bp, synthetic construct
  misc_feature 1..16: note = Synthetic oligonucleotide
  source 1..16: mol_type = other DNA
tggttctcacatactc

SEQ ID NO: 1423 - DNA, 16 bp, synthetic construct
  misc_feature 1..16: note = Synthetic oligonucleotide
  source 1..16: mol_type = other DNA
ctagagatctgagctt

SEQ ID NO: 1424 - DNA, 16 bp, synthetic construct
  misc_feature 1..16: note = Synthetic oligonucleotide
  source 1..16: mol_type = other DNA
cagcttgatgagtagg

SEQ ID NO: 1425 - DNA, 16 bp, synthetic construct
  misc_feature 1..16: note = Synthetic oligonucleotide
  source 1..16: mol_type = other DNA
gggcctcctccttgag

SEQ ID NO: 1426 - DNA, 16 bp, synthetic construct
  misc_feature 1..16: note = Synthetic oligonucleotide
  source 1..16: mol_type = other DNA
aagttggtgctcagac

SEQ ID NO: 1427 - DNA, 16 bp, synthetic construct
  misc_feature 1..16: note = Synthetic oligonucleotide
  source 1..16: mol_type = other DNA
acagcgggtcctccct

SEQ ID NO: 1428 - DNA, 16 bp, synthetic construct
  misc_feature 1..16: note = Synthetic oligonucleotide
  source 1..16: mol_type = other DNA
tcgcataaaactttgc

SEQ ID NO: 1429 - DNA, 16 bp, synthetic construct
  misc_feature 1..16: note = Synthetic oligonucleotide
  source 1..16: mol_type = other DNA
cagaggacgggcagcc

SEQ ID NO: 1430 - DNA, 16 bp, synthetic construct
  misc_feature 1..16: note = Synthetic oligonucleotide
  source 1..16: mol_type = other DNA
agtccatccgggttct

SEQ ID NO: 1431 - DNA, 16 bp, synthetic construct
  misc_feature 1..16: note = Synthetic oligonucleotide
  source 1..16: mol_type = other DNA
cccacttgagtcattt

SEQ ID NO: 1432 - DNA, 16 bp, synthetic construct
  misc_feature 1..16: note = Synthetic oligonucleotide
  source 1..16: mol_type = other DNA
agagcgggaggtgaca

SEQ ID NO: 1433 - DNA, 16 bp, synthetic construct
  misc_feature 1..16: note = Synthetic oligonucleotide
  source 1..16: mol_type = other DNA
tcaggcccgatacatt

SEQ ID NO: 1434 - DNA, 16 bp, synthetic construct
  misc_feature 1..16: note = Synthetic oligonucleotide
  source 1..16: mol_type = other DNA
attattctcatggtac

SEQ ID NO: 1435 - DNA, 16 bp, synthetic construct
  misc_feature 1..16: note = Synthetic oligonucleotide
  source 1..16: mol_type = other DNA
ccttagggaggcccta

SEQ ID NO: 1436 - DNA, 16 bp, synthetic construct
  misc_feature 1..16: note = Synthetic oligonucleotide
  source 1..16: mol_type = other DNA
aaaattctattgggcc

SEQ ID NO: 1437 - DNA, 16 bp, synthetic construct
  misc_feature 1..16: note = Synthetic oligonucleotide
  source 1..16: mol_type = other DNA
ttttcaccatagcacg

SEQ ID NO: 1438 - DNA, 16 bp, synthetic construct
  misc_feature 1..16: note = Synthetic oligonucleotide
  source 1..16: mol_type = other DNA
gtccttactgcagttt

SEQ ID NO: 1439 - DNA, 16 bp, synthetic construct
  misc_feature 1..16: note = Synthetic oligonucleotide
  source 1..16: mol_type = other DNA
cagggattttccaaca

SEQ ID NO: 1440 - DNA, 16 bp, synthetic construct
  misc_feature 1..16: note = Synthetic oligonucleotide
  source 1..16: mol_type = other DNA
gtctcacctgtattcg

SEQ ID NO: 1441 - DNA, 16 bp, synthetic construct
  misc_feature 1..16: note = Synthetic oligonucleotide
  source 1..16: mol_type = other DNA
ttgcactaaaagctga

SEQ ID NO: 1442 - DNA, 16 bp, synthetic construct
  misc_feature 1..16: note = Synthetic oligonucleotide
  source 1..16: mol_type = other DNA
ccagaaatccttatgc

SEQ ID NO: 1443 - DNA, 16 bp, synthetic construct
  misc_feature 1..16: note = Synthetic oligonucleotide
  source 1..16: mol_type = other DNA
gttccatgtatgccca

SEQ ID NO: 1444 - DNA, 16 bp, synthetic construct
  misc_feature 1..16: note = Synthetic oligonucleotide
  source 1..16: mol_type = other DNA
acactcaatcataccc

SEQ ID NO: 1445 - DNA, 16 bp, synthetic construct
  misc_feature 1..16: note = Synthetic oligonucleotide
  source 1..16: mol_type = other DNA
ccaattcagctaagac

SEQ ID NO: 1446 - DNA, 16 bp, synthetic construct
  misc_feature 1..16: note = Synthetic oligonucleotide
  source 1..16: mol_type = other DNA
aggagttgctgaaacc

SEQ ID NO: 1447 - DNA, 16 bp, synthetic construct
  misc_feature 1..16: note = Synthetic oligonucleotide
  source 1..16: mol_type = other DNA
gtcatatcagatgggt

SEQ ID NO: 1448 - DNA, 16 bp, synthetic construct
  misc_feature 1..16: note = Synthetic oligonucleotide
  source 1..16: mol_type = other DNA
ctacgaggcctttaga

SEQ ID NO: 1449 - DNA, 16 bp, synthetic construct
  misc_feature 1..16: note = Synthetic oligonucleotide
  source 1..16: mol_type = other DNA
cctctggcactaaatc

SEQ ID NO: 1450 - DNA, 16 bp, synthetic construct
  misc_feature 1..16: note = Synthetic oligonucleotide
  source 1..16: mol_type = other DNA
tggctgggcgagcgat

SEQ ID NO: 1451 - DNA, 16 bp, synthetic construct
  misc_feature 1..16: note = Synthetic oligonucleotide
  source 1..16: mol_type = other DNA
ctgacttggttgccgt

SEQ ID NO: 1452 - DNA, 16 bp, synthetic construct
  misc_feature 1..16: note = Synthetic oligonucleotide
  source 1..16: mol_type = other DNA
gggcctgttattaaac

SEQ ID NO: 1453 - DNA, 16 bp, synthetic construct
  misc_feature 1..16: note = Synthetic oligonucleotide
  source 1..16: mol_type = other DNA
tgatccttgaggcacc

SEQ ID NO: 1454 - DNA, 16 bp, synthetic construct
  misc_feature 1..16: note = Synthetic oligonucleotide
  source 1..16: mol_type = other DNA
aactaccatgcaaagg

SEQ ID NO: 1455 - DNA, 16 bp, synthetic construct
  misc_feature 1..16: note = Synthetic oligonucleotide
  source 1..16: mol_type = other DNA
actccttatgttttga

SEQ ID NO: 1456 - DNA, 16 bp, synthetic construct
  misc_feature 1..16: note = Synthetic oligonucleotide
  source 1..16: mol_type = other DNA
ccagacagcgagagtc

SEQ ID NO: 1457 - DNA, 16 bp, synthetic construct
  misc_feature 1..16: note = Synthetic oligonucleotide
  source 1..16: mol_type = other DNA
gcatgatgtaaaattg

SEQ ID NO: 1458 - DNA, 16 bp, synthetic construct
  misc_feature 1..16: note = Synthetic oligonucleotide
  source 1..16: mol_type = other DNA
aggattactcctgaag

SEQ ID NO: 1459 - DNA, 16 bp, synthetic construct
  misc_feature 1..16: note = Synthetic oligonucleotide
  source 1..16: mol_type = other DNA
aaataatggtaggtct

SEQ ID NO: 1460 - DNA, 16 bp, synthetic construct
  misc_feature 1..16: note = Synthetic oligonucleotide
  source 1..16: mol_type = other DNA
ggtatattcctgacca

SEQ ID NO: 1461 - DNA, 16 bp, synthetic construct
  misc_feature 1..16: note = Synthetic oligonucleotide
  source 1..16: mol_type = other DNA
tggaatccagatgtgt

SEQ ID NO: 1462 - DNA, 16 bp, synthetic construct
  misc_feature 1..16: note = Synthetic oligonucleotide
  source 1..16: mol_type = other DNA
aatatcaacacatcat

SEQ ID NO: 1463 - DNA, 16 bp, synthetic construct
  misc_feature 1..16: note = Synthetic oligonucleotide
  source 1..16: mol_type = other DNA
ccagtgatcacttcca

SEQ ID NO: 1464 - DNA, 16 bp, synthetic construct
  misc_feature 1..16: note = Synthetic oligonucleotide
  source 1..16: mol_type = other DNA
aacattgaaacaccag

SEQ ID NO: 1465 - DNA, 16 bp, synthetic construct
  misc_feature 1..16: note = Synthetic oligonucleotide
  source 1..16: mol_type = other DNA
agcttccataagccag

SEQ ID NO: 1466 - DNA, 16 bp, synthetic construct
  misc_feature 1..16: note = Synthetic oligonucleotide
  source 1..16: mol_type = other DNA
ggtagggctctaattc

SEQ ID NO: 1467 - DNA, 16 bp, synthetic construct
  misc_feature 1..16: note = Synthetic oligonucleotide
  source 1..16: mol_type = other DNA
tagagggaattgtgtg

SEQ ID NO: 1468 - DNA, 16 bp, synthetic construct
  misc_feature 1..16: note = Synthetic oligonucleotide
  source 1..16: mol_type = other DNA
gctgtgatgtgggact

SEQ ID NO: 1469 - DNA, 16 bp, synthetic construct
  misc_feature 1..16: note = Synthetic oligonucleotide
  source 1..16: mol_type = other DNA
gaaagtgtgggagtgc

SEQ ID NO: 1470 - DNA, 16 bp, synthetic construct
  misc_feature 1..16: note = Synthetic oligonucleotide
  source 1..16: mol_type = other DNA
gacaggtcctccagtc

SEQ ID NO: 1471 - DNA, 16 bp, synthetic construct
  misc_feature 1..16: note = Synthetic oligonucleotide
  source 1..16: mol_type = other DNA
atgtcgctgcagggcc

SEQ ID NO: 1472 - DNA, 16 bp, synthetic construct
  misc_feature 1..16: note = Synthetic oligonucleotide
  source 1..16: mol_type = other DNA
tactgctctctgggtc

SEQ ID NO: 1473 - DNA, 16 bp, synthetic construct
  misc_feature 1..16: note = Synthetic oligonucleotide
  source 1..16: mol_type = other DNA
accagtttctgtactg

SEQ ID NO: 1474 - DNA, 16 bp, synthetic construct
  misc_feature 1..16: note = Synthetic oligonucleotide
  source 1..16: mol_type = other DNA
catctgcaagggcacg

SEQ ID NO: 1475 - DNA, 16 bp, synthetic construct
  misc_feature 1..16: note = Synthetic oligonucleotide
  source 1..16: mol_type = other DNA
attggcgatggtggtg

SEQ ID NO: 1476 - DNA, 16 bp, synthetic construct
  misc_feature 1..16: note = Synthetic oligonucleotide
  source 1..16: mol_type = other DNA
tccctctgtgaagggt

SEQ ID NO: 1477 - DNA, 16 bp, synthetic construct
  misc_feature 1..16: note = Synthetic oligonucleotide
  source 1..16: mol_type = other DNA
ctggtaatcccggtca

SEQ ID NO: 1478 - DNA, 16 bp, synthetic construct
  misc_feature 1..16: note = Synthetic oligonucleotide
  source 1..16: mol_type = other DNA
tgtgtccaccacttct

SEQ ID NO: 1479 - DNA, 16 bp, synthetic construct
  misc_feature 1..16: note = Synthetic oligonucleotide
  source 1..16: mol_type = other DNA
agtattgccagctaag

SEQ ID NO: 1480 - DNA, 16 bp, synthetic construct
  misc_feature 1..16: note = Synthetic oligonucleotide
  source 1..16: mol_type = other DNA
gaagattggctctggc

SEQ ID NO: 1481 - DNA, 16 bp, synthetic construct
  misc_feature 1..16: note = Synthetic oligonucleotide
  source 1..16: mol_type = other DNA
accgctttcagctgag

SEQ ID NO: 1482 - DNA, 16 bp, synthetic construct
  misc_feature 1..16: note = Synthetic oligonucleotide
  source 1..16: mol_type = other DNA
tgagcttgactcctct

SEQ ID NO: 1483 - DNA, 16 bp, synthetic construct
  misc_feature 1..16: note = Synthetic oligonucleotide
  source 1..16: mol_type = other DNA
tgccccctcatgtaag

SEQ ID NO: 1484 - DNA, 16 bp, synthetic construct
  misc_feature 1..16: note = Synthetic oligonucleotide
  source 1..16: mol_type = other DNA
gcatatctctcctggt

SEQ ID NO: 1485 - DNA, 16 bp, synthetic construct
  misc_feature 1..16: note = Synthetic oligonucleotide
  source 1..16: mol_type = other DNA
ctcagttccataaact

SEQ ID NO: 1486 - DNA, 16 bp, synthetic construct
  misc_feature 1..16: note = Synthetic oligonucleotide
  source 1..16: mol_type = other DNA
gccttctccttgctgc

SEQ ID NO: 1487 - DNA, 16 bp, synthetic construct
  misc_feature 1..16: note = Synthetic oligonucleotide
  source 1..16: mol_type = other DNA
acacccggccccccaa

SEQ ID NO: 1488 - DNA, 16 bp, synthetic construct
  misc_feature 1..16: note = Synthetic oligonucleotide
  source 1..16: mol_type = other DNA
tatccaactgttctaa

SEQ ID NO: 1489 - DNA, 16 bp, synthetic construct
  misc_feature 1..16: note = Synthetic oligonucleotide
  source 1..16: mol_type = other DNA
gatatgcccccaggag

SEQ ID NO: 1490 - DNA, 16 bp, synthetic construct
  misc_feature 1..16: note = Synthetic oligonucleotide
  source 1..16: mol_type = other DNA
ccaccccaatgaccat

SEQ ID NO: 1491 - DNA, 16 bp, synthetic construct
  misc_feature 1..16: note = Synthetic oligonucleotide
  source 1..16: mol_type = other DNA
ttggttctcacatact

SEQ ID NO: 1492 - DNA, 16 bp, synthetic construct
  misc_feature 1..16: note = Synthetic oligonucleotide
  source 1..16: mol_type = other DNA
tctagagatctgagct

SEQ ID NO: 1493 - DNA, 16 bp, synthetic construct
  misc_feature 1..16: note = Synthetic oligonucleotide
  source 1..16: mol_type = other DNA
ccagcttgatgagtag

SEQ ID NO: 1494 - DNA, 16 bp, synthetic construct
  misc_feature 1..16: note = Synthetic oligonucleotide
  source 1..16: mol_type = other DNA
caagttggtgctcaga

SEQ ID NO: 1495 - DNA, 16 bp, synthetic construct
  misc_feature 1..16: note = Synthetic oligonucleotide
  source 1..16: mol_type = other DNA
tcaactaggatacagc

SEQ ID NO: 1496 - DNA, 16 bp, synthetic construct
  misc_feature 1..16: note = Synthetic oligonucleotide
  source 1..16: mol_type = other DNA
atccttcttcgcataa

SEQ ID NO: 1497 - DNA, 16 bp, synthetic construct
  misc_feature 1..16: note = Synthetic oligonucleotide
  source 1..16: mol_type = other DNA
aatcagaggacgggca

SEQ ID NO: 1498 - DNA, 16 bp, synthetic construct
  misc_feature 1..16: note = Synthetic oligonucleotide
  source 1..16: mol_type = other DNA
ctagtccatccgggtt

SEQ ID NO: 1499 - DNA, 16 bp, synthetic construct
  misc_feature 1..16: note = Synthetic oligonucleotide
  source 1..16: mol_type = other DNA
ccccacttgagtcatt

SEQ ID NO: 1500 - DNA, 16 bp, synthetic construct
  misc_feature 1..16: note = Synthetic oligonucleotide
  source 1..16: mol_type = other DNA
cagagcgggaggtgac

SEQ ID NO: 1501 - DNA, 16 bp, synthetic construct
  misc_feature 1..16: note = Synthetic oligonucleotide
  source 1..16: mol_type = other DNA
atcaggcccgatacat

SEQ ID NO: 1502 - DNA, 16 bp, synthetic construct
  misc_feature 1..16: note = Synthetic oligonucleotide
  source 1..16: mol_type = other DNA
ctcaagacaacatggg

SEQ ID NO: 1503 - DNA, 16 bp, synthetic construct
  misc_feature 1..16: note = Synthetic oligonucleotide
  source 1..16: mol_type = other DNA
cccttagggaggccct

SEQ ID NO: 1504 - DNA, 16 bp, synthetic construct
  misc_feature 1..16: note = Synthetic oligonucleotide
  source 1..16: mol_type = other DNA
cttactcaattaactc

SEQ ID NO: 1505 - DNA, 16 bp, synthetic construct
  misc_feature 1..16: note = Synthetic oligonucleotide
  source 1..16: mol_type = other DNA
actttttcaccatagc

SEQ ID NO: 1506 - DNA, 16 bp, synthetic construct
  misc_feature 1..16: note = Synthetic oligonucleotide
  source 1..16: mol_type = other DNA
tgtccttactgcagtt

SEQ ID NO: 1507 - DNA, 16 bp, synthetic construct
  misc_feature 1..16: note = Synthetic oligonucleotide
  source 1..16: mol_type = other DNA
ccagggattttccaac

SEQ ID NO: 1508 - DNA, 16 bp, synthetic construct
  misc_feature 1..16: note = Synthetic oligonucleotide
  source 1..16: mol_type = other DNA
ggtctcacctgtattc

SEQ ID NO: 1509 - DNA, 16 bp, synthetic construct
  misc_feature 1..16: note = Synthetic oligonucleotide
  source 1..16: mol_type = other DNA
tttgcactaaaagctg

SEQ ID NO: 1510 - DNA, 16 bp, synthetic construct
  misc_feature 1..16: note = Synthetic oligonucleotide
  source 1..16: mol_type = other DNA
cccagaaatccttatg

SEQ ID NO: 1511 - DNA, 16 bp, synthetic construct
  misc_feature 1..16: note = Synthetic oligonucleotide
  source 1..16: mol_type = other DNA
cgttccatgtatgccc

SEQ ID NO: 1512 - DNA, 16 bp, synthetic construct
  misc_feature 1..16: note = Synthetic oligonucleotide
  source 1..16: mol_type = other DNA
cacactcaatcatacc

SEQ ID NO: 1513 - DNA, 16 bp, synthetic construct
  misc_feature 1..16: note = Synthetic oligonucleotide
  source 1..16: mol_type = other DNA
ggccaattcagctaag

SEQ ID NO: 1514 - DNA, 16 bp, synthetic construct
  misc_feature 1..16: note = Synthetic oligonucleotide
  source 1..16: mol_type = other DNA
cctacgaggcctttag

SEQ ID NO: 1515 - DNA, 16 bp, synthetic construct
  misc_feature 1..16: note = Synthetic oligonucleotide
  source 1..16: mol_type = other DNA
acctctggcactaaat

SEQ ID NO: 1516 - DNA, 16 bp, synthetic construct
  misc_feature 1..16: note = Synthetic oligonucleotide
  source 1..16: mol_type = other DNA
ttggctgggcgagcga

SEQ ID NO: 1517 - DNA, 16 bp, synthetic construct
  misc_feature 1..16: note = Synthetic oligonucleotide
  source 1..16: mol_type = other DNA
gctgacttggttgccg

SEQ ID NO: 1518 - DNA, 16 bp, synthetic construct
  misc_feature 1..16: note = Synthetic oligonucleotide
  source 1..16: mol_type = other DNA
tgggcctgttattaaa

SEQ ID NO: 1519 - DNA, 16 bp, synthetic construct
  misc_feature 1..16: note = Synthetic oligonucleotide
  source 1..16: mol_type = other DNA
ctgatccttgaggcac

SEQ ID NO: 1520 - DNA, 16 bp, synthetic construct
  misc_feature 1..16: note = Synthetic oligonucleotide
  source 1..16: mol_type = other DNA
caactaccatgcaaag

SEQ ID NO: 1521 - DNA, 16 bp, synthetic construct
  misc_feature 1..16: note = Synthetic oligonucleotide
  source 1..16: mol_type = other DNA
aactccttatgttttg

SEQ ID NO: 1522 - DNA, 16 bp, synthetic construct
  misc_feature 1..16: note = Synthetic oligonucleotide
  source 1..16: mol_type = other DNA
tccagacagcgagagt

SEQ ID NO: 1523 - DNA, 16 bp, synthetic construct
  misc_feature 1..16: note = Synthetic oligonucleotide
  source 1..16: mol_type = other DNA
ggcatgatgtaaaatt

SEQ ID NO: 1524 - DNA, 16 bp, synthetic construct
  misc_feature 1..16: note = Synthetic oligonucleotide
  source 1..16: mol_type = other DNA
gcaggattactcctga

SEQ ID NO: 1525 - DNA, 16 bp, synthetic construct
  misc_feature 1..16: note = Synthetic oligonucleotide
  source 1..16: mol_type = other DNA
acagtgaaacaagcaa

SEQ ID NO: 1526 - DNA, 16 bp, synthetic construct
  misc_feature 1..16: note = Synthetic oligonucleotide
  source 1..16: mol_type = other DNA
tggtatattcctgacc

SEQ ID NO: 1527 - DNA, 16 bp, synthetic construct
  misc_feature 1..16: note = Synthetic oligonucleotide
  source 1..16: mol_type = other DNA
ccttaatgtaaattcc

SEQ ID NO: 1528 - DNA, 16 bp, synthetic construct
  misc_feature 1..16: note = Synthetic oligonucleotide
  source 1..16: mol_type = other DNA
atgtgaatatcaacac

SEQ ID NO: 1529 - DNA, 16 bp, synthetic construct
  misc_feature 1..16: note = Synthetic oligonucleotide
  source 1..16: mol_type = other DNA
cccagtgatcacttcc

SEQ ID NO: 1530 - DNA, 16 bp, synthetic construct
  misc_feature 1..16: note = Synthetic oligonucleotide
  source 1..16: mol_type = other DNA
gaacattgaaacacca

SEQ ID NO: 1531 - DNA, 16 bp, synthetic construct
  misc_feature 1..16: note = Synthetic oligonucleotide
  source 1..16: mol_type = other DNA
cagcttccataagcca

SEQ ID NO: 1532 - DNA, 16 bp, synthetic construct
  misc_feature 1..16: note = Synthetic oligonucleotide
  source 1..16: mol_type = other DNA
gagatcacaagggtag

SEQ ID NO: 1533 - DNA, 16 bp, synthetic construct
  misc_feature 1..16: note = Synthetic oligonucleotide
  source 1..16: mol_type = other DNA
atagagggaattgtgt

SEQ ID NO: 1534 - DNA, 16 bp, synthetic construct
  misc_feature 1..16: note = Synthetic oligonucleotide
  source 1..16: mol_type = other DNA
agctgtgatgtgggac

SEQ ID NO: 1535 - DNA, 16 bp, synthetic construct
  misc_feature 1..16: note = Synthetic oligonucleotide
  source 1..16: mol_type = other DNA
gttggaggaaagtgtg

SEQ ID NO: 1536 - DNA, 16 bp, synthetic construct
  misc_feature 1..16: note = Synthetic oligonucleotide
  source 1..16: mol_type = other DNA
tctgacataagcccag

SEQ ID NO: 1537 - DNA, 16 bp, synthetic construct
  misc_feature 1..16: note = Synthetic oligonucleotide
  source 1..16: mol_type = other DNA
agaaccacctatataa

SEQ ID NO: 1538 - DNA, 16 bp, synthetic construct
  misc_feature 1..16: note = Synthetic oligonucleotide
  source 1..16: mol_type = other DNA
atataccgaggaattc

SEQ ID NO: 1539 - DNA, 16 bp, synthetic construct
  misc_feature 1..16: note = Synthetic oligonucleotide
  source 1..16: mol_type = other DNA
atcccacctccagtta

SEQ ID NO: 1540 - DNA, 16 bp, synthetic construct
  misc_feature 1..16: note = Synthetic oligonucleotide
  source 1..16: mol_type = other DNA
ccaaggaaaagtgcac

SEQ ID NO: 1541 - DNA, 16 bp, synthetic construct
  misc_feature 1..16: note = Synthetic oligonucleotide
  source 1..16: mol_type = other DNA
ttgaggatctccagta

SEQ ID NO: 1542 - DNA, 16 bp, synthetic construct
  misc_feature 1..16: note = Synthetic oligonucleotide
  source 1..16: mol_type = other DNA
gtgccagtttttgtct

SEQ ID NO: 1543 - DNA, 16 bp, synthetic construct
  misc_feature 1..16: note = Synthetic oligonucleotide
  source 1..16: mol_type = other DNA
gccttcttatgttatc

SEQ ID NO: 1544 - DNA, 16 bp, synthetic construct
  misc_feature 1..16: note = Synthetic oligonucleotide
  source 1..16: mol_type = other DNA
cctttgtggaccttct

SEQ ID NO: 1545 - DNA, 16 bp, synthetic construct
  misc_feature 1..16: note = Synthetic oligonucleotide
  source 1..16: mol_type = other DNA
cccatgccgacgaggg

SEQ ID NO: 1546 - DNA, 16 bp, synthetic construct
  misc_feature 1..16: note = Synthetic oligonucleotide
  source 1..16: mol_type = other DNA
ggctgtgattcccaac

SEQ ID NO: 1547 - DNA, 16 bp, synthetic construct
  misc_feature 1..16: note = Synthetic oligonucleotide
  source 1..16: mol_type = other DNA
ccgtagtccatggtac

SEQ ID NO: 1548 - DNA, 16 bp, synthetic construct
  misc_feature 1..16: note = Synthetic oligonucleotide
  source 1..16: mol_type = other DNA
ttgtcaaggcttttga

SEQ ID NO: 1549 - DNA, 16 bp, synthetic construct
  misc_feature 1..16: note = Synthetic oligonucleotide
  source 1..16: mol_type = other DNA
cggatgtccttcccaa

SEQ ID NO: 1550 - DNA, 16 bp, synthetic construct
  misc_feature 1..16: note = Synthetic oligonucleotide
  source 1..16: mol_type = other DNA
tggctcagtgacccgg

SEQ ID NO: 1551 - DNA, 16 bp, synthetic construct
  misc_feature 1..16: note = Synthetic oligonucleotide
  source 1..16: mol_type = other DNA
ttcattaaccctctcc

SEQ ID NO: 1552 - DNA, 16 bp, synthetic construct
  misc_feature 1..16: note = Synthetic oligonucleotide
  source 1..16: mol_type = other DNA
aggtagactacatcca

SEQ ID NO: 1553 - DNA, 16 bp, synthetic construct
  misc_feature 1..16: note = Synthetic oligonucleotide
  source 1..16: mol_type = other DNA
ttggtccgcctgcaga

SEQ ID NO: 1554 - DNA, 16 bp, synthetic construct
  misc_feature 1..16: note = Synthetic oligonucleotide
  source 1..16: mol_type = other DNA
ttgggtcaaaagcgat

SEQ ID NO: 1555 - DNA, 16 bp, synthetic construct
  misc_feature 1..16: note = Synthetic oligonucleotide
  source 1..16: mol_type = other DNA
tcagctatggaaatgc

SEQ ID NO: 1556 - DNA, 16 bp, synthetic construct
  misc_feature 1..16: note = Synthetic oligonucleotide
  source 1..16: mol_type = other DNA
ctaaagtaaactgctt

SEQ ID NO: 1557 - DNA, 16 bp, synthetic construct
  misc_feature 1..16: note = Synthetic oligonucleotide
  source 1..16: mol_type = other DNA
gttccttcaagcctcc

SEQ ID NO: 1558 - DNA, 16 bp, synthetic construct
  misc_feature 1..16: note = Synthetic oligonucleotide
  source 1..16: mol_type = other DNA
cttcggaggacattga

SEQ ID NO: 1559 - DNA, 16 bp, synthetic construct
  misc_feature 1..16: note = Synthetic oligonucleotide
  source 1..16: mol_type = other DNA
gaagccgctgcctgac

SEQ ID NO: 1560 - DNA, 16 bp, synthetic construct
  misc_feature 1..16: note = Synthetic oligonucleotide
  source 1..16: mol_type = other DNA
cccttcagtgttcaag

SEQ ID NO: 1561 - DNA, 16 bp, synthetic construct
  misc_feature 1..16: note = Synthetic oligonucleotide
  source 1..16: mol_type = other DNA
tttacttaccgggtaa

SEQ ID NO: 1562 - DNA, 16 bp, synthetic construct
  misc_feature 1..16: note = Synthetic oligonucleotide
  source 1..16: mol_type = other DNA
atcctgggcggcgaca

SEQ ID NO: 1563 - DNA, 16 bp, synthetic construct
  misc_feature 1..16: note = Synthetic oligonucleotide
  source 1..16: mol_type = other DNA
aggcaccattctgcaa

SEQ ID NO: 1564 - DNA, 16 bp, synthetic construct
  misc_feature 1..16: note = Synthetic oligonucleotide
  source 1..16: mol_type = other DNA
tgagctgtttccccaa

SEQ ID NO: 1565 - DNA, 16 bp, synthetic construct
  misc_feature 1..16: note = Synthetic oligonucleotide
  source 1..16: mol_type = other DNA
ccagtccaattgtgca

SEQ ID NO: 1566 - DNA, 16 bp, synthetic construct
  misc_feature 1..16: note = Synthetic oligonucleotide
  source 1..16: mol_type = other DNA
tgttcactgtgtgatc

SEQ ID NO: 1567 - DNA, 16 bp, synthetic construct
  misc_feature 1..16: note = Synthetic oligonucleotide
  source 1..16: mol_type = other DNA
gcctcttacatgtgtc

SEQ ID NO: 1568 - DNA, 16 bp, synthetic construct
  misc_feature 1..16: note = Synthetic oligonucleotide
  source 1..16: mol_type = other DNA
tgtgagccaccagtgg

SEQ ID NO: 1569 - DNA, 16 bp, synthetic construct
  misc_feature 1..16: note = Synthetic oligonucleotide
  source 1..16: mol_type = other DNA
gggccgtgtcacccta

SEQ ID NO: 1570 - DNA, 16 bp, synthetic construct
  misc_feature 1..16: note = Synthetic oligonucleotide
  source 1..16: mol_type = other DNA
cccccccgctgattcc

SEQ ID NO: 1571 - DNA, 16 bp, synthetic construct
  misc_feature 1..16: note = Synthetic oligonucleotide
  source 1..16: mol_type = other DNA
accagcctcaggtgga

SEQ ID NO: 1572 - DNA, 16 bp, synthetic construct
  misc_feature 1..16: note = Synthetic oligonucleotide
  source 1..16: mol_type = other DNA
caaaggacagaccggg

SEQ ID NO: 1573 - DNA, 16 bp, synthetic construct
  misc_feature 1..16: note = Synthetic oligonucleotide
  source 1..16: mol_type = other DNA
aggccaggtagccgtg

SEQ ID NO: 1574 - DNA, 16 bp, synthetic construct
  misc_feature 1..16: note = Synthetic oligonucleotide
  source 1..16: mol_type = other DNA
ttagatgactgaactc

SEQ ID NO: 1575 - DNA, 16 bp, synthetic construct
  misc_feature 1..16: note = Synthetic oligonucleotide
  source 1..16: mol_type = other DNA
agcctcctccagtttg

SEQ ID NO: 1576 - DNA, 16 bp, synthetic construct
  misc_feature 1..16: note = Synthetic oligonucleotide
  source 1..16: mol_type = other DNA
cgataaaccttgtctc

SEQ ID NO: 1577 - DNA, 16 bp, synthetic construct
  misc_feature 1..16: note = Synthetic oligonucleotide
  source 1..16: mol_type = other DNA
cagttttgtaagtgca

SEQ ID NO: 1578 - DNA, 16 bp, synthetic construct
  misc_feature 1..16: note = Synthetic oligonucleotide
  source 1..16: mol_type = other DNA
cggagacctccctaaa

SEQ ID NO: 1579 - DNA, 16 bp, synthetic construct
  misc_feature 1..16: note = Synthetic oligonucleotide
  source 1..16: mol_type = other DNA
gggcaaggctaagttc

SEQ ID NO: 1580 - DNA, 16 bp, synthetic construct
  misc_feature 1..16: note = Synthetic oligonucleotide
  source 1..16: mol_type = other DNA
ccagcaaagacaagaa

SEQ ID NO: 1581 - DNA, 16 bp, synthetic construct
  misc_feature 1..16: note = Synthetic oligonucleotide
  source 1..16: mol_type = other DNA
ggtacaaaactgcatt

SEQ ID NO: 1582 - DNA, 16 bp, synthetic construct
  misc_feature 1..16: note = Synthetic oligonucleotide
  source 1..16: mol_type = other DNA
tcactaaaccccacac

SEQ ID NO: 1583 - DNA, 16 bp, synthetic construct
  misc_feature 1..16: note = Synthetic oligonucleotide
  source 1..16: mol_type = other DNA
cagtgagatccaactc

SEQ ID NO: 1584 - DNA, 16 bp, synthetic construct
  misc_feature 1..16: note = Synthetic oligonucleotide
  source 1..16: mol_type = other DNA
atgggcccacaggatc

SEQ ID NO: 1585 - DNA, 16 bp, synthetic construct
  misc_feature 1..16: note = Synthetic oligonucleotide
  source 1..16: mol_type = other DNA
tacttctgttagatac

SEQ ID NO: 1586 - DNA, 16 bp, synthetic construct
  misc_feature 1..16: note = Synthetic oligonucleotide
  source 1..16: mol_type = other DNA
tgtaaccccctgaaac

SEQ ID NO: 1587 - DNA, 16 bp, synthetic construct
  misc_feature 1..16: note = Synthetic oligonucleotide
  source 1..16: mol_type = other DNA
tgaaacattcctggac

SEQ ID NO: 1588 - DNA, 16 bp, synthetic construct
  misc_feature 1..16: note = Synthetic oligonucleotide
  source 1..16: mol_type = other DNA
acccaggtttggatgg

SEQ ID NO: 1589 - DNA, 16 bp, synthetic construct
  misc_feature 1..16: note = Synthetic oligonucleotide
  source 1..16: mol_type = other DNA
gtggcaactctgtaag

SEQ ID NO: 1590 - DNA, 16 bp, synthetic construct
  misc_feature 1..16: note = Synthetic oligonucleotide
  source 1..16: mol_type = other DNA
ggctgagtgctctcgg

SEQ ID NO: 1591 - DNA, 16 bp, synthetic construct
  misc_feature 1..16: note = Synthetic oligonucleotide
  source 1..16: mol_type = other DNA
agggtacacggctctc

SEQ ID NO: 1592 - DNA, 16 bp, synthetic construct
  misc_feature 1..16: note = Synthetic oligonucleotide
  source 1..16: mol_type = other DNA
ggtcttgggcactctc

SEQ ID NO: 1593 - DNA, 16 bp, synthetic construct
  misc_feature 1..16: note = Synthetic oligonucleotide
  source 1..16: mol_type = other DNA
ataatgtctcaaactc

SEQ ID NO: 1594 - DNA, 16 bp, synthetic construct
  misc_feature 1..16: note = Synthetic oligonucleotide
  source 1..16: mol_type = other DNA
caccgcccaaaaccat

SEQ ID NO: 1595 - DNA, 16 bp, synthetic construct
  misc_feature 1..16: note = Synthetic oligonucleotide
  source 1..16: mol_type = other DNA
cgtgcacacacaagag

SEQ ID NO: 1596 - DNA, 16 bp, synthetic construct
  misc_feature 1..16: note = Synthetic oligonucleotide
  source 1..16: mol_type = other DNA
gggaattatggaattg

SEQ ID NO: 1597 - DNA, 16 bp, synthetic construct
  misc_feature 1..16: note = Synthetic oligonucleotide
  source 1..16: mol_type = other DNA
gaactcaagtcagtac

SEQ ID NO: 1598 - DNA, 16 bp, synthetic construct
  misc_feature 1..16: note = Synthetic oligonucleotide
  source 1..16: mol_type = other DNA
ctccctgtaatcacac

SEQ ID NO: 1599 - DNA, 16 bp, synthetic construct
  misc_feature 1..16: note = Synthetic oligonucleotide
  source 1..16: mol_type = other DNA
taggcattcagaattt

SEQ ID NO: 1600 - DNA, 16 bp, synthetic construct
  misc_feature 1..16: note = Synthetic oligonucleotide
  source 1..16: mol_type = other DNA
attattggttcaaaag

SEQ ID NO: 1601 - DNA, 16 bp, synthetic construct
  misc_feature 1..16: note = Synthetic oligonucleotide
  source 1..16: mol_type = other DNA
cctgttgggtcaaaca

SEQ ID NO: 1602 - DNA, 16 bp, synthetic construct
  misc_feature 1..16: note = Synthetic oligonucleotide
  source 1..16: mol_type = other DNA
ccaacatgaagtgagc

SEQ ID NO: 1603 - DNA, 16 bp, synthetic construct
  misc_feature 1..16: note = Synthetic oligonucleotide
  source 1..16: mol_type = other DNA
cttttggcaccttcac

SEQ ID NO: 1604 - DNA, 16 bp, synthetic construct
  misc_feature 1..16: note = Synthetic oligonucleotide
  source 1..16: mol_type = other DNA
tattagagggctagtg

SEQ ID NO: 1605 - DNA, 16 bp, synthetic construct
  misc_feature 1..16: note = Synthetic oligonucleotide
  source 1..16: mol_type = other DNA
taaactcaggtgacta

SEQ ID NO: 1606 - DNA, 16 bp, synthetic construct
  misc_feature 1..16: note = Synthetic oligonucleotide
  source 1..16: mol_type = other DNA
atggagtcattagtgc

SEQ ID NO: 1607 - DNA, 16 bp, synthetic construct
  misc_feature 1..16: note = Synthetic oligonucleotide
  source 1..16: mol_type = other DNA
taacagccattgcata

SEQ ID NO: 1608 - DNA, 16 bp, synthetic construct
  misc_feature 1..16: note = Synthetic oligonucleotide
  source 1..16: mol_type = other DNA
gatataccgaggaatt

SEQ ID NO: 1609 - DNA, 16 bp, synthetic construct
  misc_feature 1..16: note = Synthetic oligonucleotide
  source 1..16: mol_type = other DNA
gatcccacctccagtt

SEQ ID NO: 1610 - DNA, 16 bp, synthetic construct
  misc_feature 1..16: note = Synthetic oligonucleotide
  source 1..16: mol_type = other DNA
caccaaggaaaagtgc

SEQ ID NO: 1611 - DNA, 16 bp, synthetic construct
  misc_feature 1..16: note = Synthetic oligonucleotide
  source 1..16: mol_type = other DNA
actttgaggatctcca

SEQ ID NO: 1612 - DNA, 16 bp, synthetic construct
  misc_feature 1..16: note = Synthetic oligonucleotide
  source 1..16: mol_type = other DNA
cgtgccagtttttgtc

SEQ ID NO: 1613 - DNA, 16 bp, synthetic construct
  misc_feature 1..16: note = Synthetic oligonucleotide
  source 1..16: mol_type = other DNA
agccttcttatgttat

SEQ ID NO: 1614 - DNA, 16 bp, synthetic construct
  misc_feature 1..16: note = Synthetic oligonucleotide
  source 1..16: mol_type = other DNA
gcctttgtggaccttc

SEQ ID NO: 1615 - DNA, 16 bp, synthetic construct
  misc_feature 1..16: note = Synthetic oligonucleotide
  source 1..16: mol_type = other DNA
acccatgccgacgagg

SEQ ID NO: 1616 - DNA, 16 bp, synthetic construct
  misc_feature 1..16: note = Synthetic oligonucleotide
  source 1..16: mol_type = other DNA
cggctgtgattcccaa

SEQ ID NO: 1617 - DNA, 16 bp, synthetic construct
  misc_feature 1..16: note = Synthetic oligonucleotide
  source 1..16: mol_type = other DNA
tccgtagtccatggta

SEQ ID NO: 1618 - DNA, 16 bp, synthetic construct
  misc_feature 1..16: note = Synthetic oligonucleotide
  source 1..16: mol_type = other DNA
tcaatttgtcaaggct

SEQ ID NO: 1619 - DNA, 16 bp, synthetic construct
  misc_feature 1..16: note = Synthetic oligonucleotide
  source 1..16: mol_type = other DNA
acggatgtccttccca

SEQ ID NO: 1620 - DNA, 16 bp, synthetic construct
  misc_feature 1..16: note = Synthetic oligonucleotide
  source 1..16: mol_type = other DNA
ttggctcagtgacccg

SEQ ID NO: 1621 - DNA, 16 bp, synthetic construct
  misc_feature 1..16: note = Synthetic oligonucleotide
  source 1..16: mol_type = other DNA
ggttcattaaccctct

SEQ ID NO: 1622 - DNA, 16 bp, synthetic construct
  misc_feature 1..16: note = Synthetic oligonucleotide
  source 1..16: mol_type = other DNA
gaggtagactacatcc

SEQ ID NO: 1623 - DNA, 16 bp, synthetic construct
  misc_feature 1..16: note = Synthetic oligonucleotide
  source 1..16: mol_type = other DNA
cttggtccgcctgcag

SEQ ID NO: 1624 - DNA, 16 bp, synthetic construct
  misc_feature 1..16: note = Synthetic oligonucleotide
  source 1..16: mol_type = other DNA
tttgggtcaaaagcga

SEQ ID NO: 1625 - DNA, 16 bp, synthetic construct
  misc_feature 1..16: note = Synthetic oligonucleotide
  source 1..16: mol_type = other DNA
gctcagctatggaaat

SEQ ID NO: 1626 - DNA, 16 bp, synthetic construct
  misc_feature 1..16: note = Synthetic oligonucleotide
  source 1..16: mol_type = other DNA
gtctaaagtaaactgc

SEQ ID NO: 1627 - DNA, 16 bp, synthetic construct
  misc_feature 1..16: note = Synthetic oligonucleotide
  source 1..16: mol_type = other DNA
tggttccttcaagcct

SEQ ID NO: 1628 - DNA, 16 bp, synthetic construct
  misc_feature 1..16: note = Synthetic oligonucleotide
  source 1..16: mol_type = other DNA
tcttcggaggacattg

SEQ ID NO: 1629 - DNA, 16 bp, synthetic construct
  misc_feature 1..16: note = Synthetic oligonucleotide
  source 1..16: mol_type = other DNA
ggaagccgctgcctga

SEQ ID NO: 1630 - DNA, 16 bp, synthetic construct
  misc_feature 1..16: note = Synthetic oligonucleotide
  source 1..16: mol_type = other DNA
gcccttcagtgttcaa

SEQ ID NO: 1631 - DNA, 16 bp, synthetic construct
  misc_feature 1..16: note = Synthetic oligonucleotide
  source 1..16: mol_type = other DNA
gtttacttaccgggta

SEQ ID NO: 1632 - DNA, 16 bp, synthetic construct
  misc_feature 1..16: note = Synthetic oligonucleotide
  source 1..16: mol_type = other DNA
aatcctgggcggcgac

SEQ ID NO: 1633 - DNA, 16 bp, synthetic construct
  misc_feature 1..16: note = Synthetic oligonucleotide
  source 1..16: mol_type = other DNA
acaggcaccattctgc

SEQ ID NO: 1634 - DNA, 16 bp, synthetic construct
  misc_feature 1..16: note = Synthetic oligonucleotide
  source 1..16: mol_type = other DNA
ccatctgagctgtttc

SEQ ID NO: 1635 - DNA, 16 bp, synthetic construct
  misc_feature 1..16: note = Synthetic oligonucleotide
  source 1..16: mol_type = other DNA
cccagtccaattgtgc

SEQ ID NO: 1636 - DNA, 16 bp, synthetic construct
  misc_feature 1..16: note = Synthetic oligonucleotide
  source 1..16: mol_type = other DNA
ttgctgtaagggacaa

SEQ ID NO: 1637 - DNA, 16 bp, synthetic construct
  misc_feature 1..16: note = Synthetic oligonucleotide
  source 1..16: mol_type = other DNA
cagagcctcttacatg

SEQ ID NO: 1638 - DNA, 16 bp, synthetic construct
  misc_feature 1..16: note = Synthetic oligonucleotide
  source 1..16: mol_type = other DNA
atgtgagccaccagtg

SEQ ID NO: 1639 - DNA, 16 bp, synthetic construct
  misc_feature 1..16: note = Synthetic oligonucleotide
  source 1..16: mol_type = other DNA
tgggccgtgtcaccct

SEQ ID NO: 1640 - DNA, 16 bp, synthetic construct
  misc_feature 1..16: note = Synthetic oligonucleotide
  source 1..16: mol_type = other DNA
ccccccccgctgattc

SEQ ID NO: 1641 - DNA, 16 bp, synthetic construct
  misc_feature 1..16: note = Synthetic oligonucleotide
  source 1..16: mol_type = other DNA
ggaccagcctcaggtg

SEQ ID NO: 1642 - DNA, 16 bp, synthetic construct
  misc_feature 1..16: note = Synthetic oligonucleotide
  source 1..16: mol_type = other DNA
gcaaaggacagaccgg

SEQ ID NO: 1643 - DNA, 16 bp, synthetic construct
  misc_feature 1..16: note = Synthetic oligonucleotide
  source 1..16: mol_type = other DNA
caggccaggtagccgt

SEQ ID NO: 1644 - DNA, 16 bp, synthetic construct
  misc_feature 1..16: note = Synthetic oligonucleotide
  source 1..16: mol_type = other DNA
tttagatgactgaact

SEQ ID NO: 1645 - DNA, 16 bp, synthetic construct
  misc_feature 1..16: note = Synthetic oligonucleotide
  source 1..16: mol_type = other DNA
aagcctcctccagttt

SEQ ID NO: 1646 - DNA, 16 bp, synthetic construct
  misc_feature 1..16: note = Synthetic oligonucleotide
  source 1..16: mol_type = other DNA
ccgataaaccttgtct

SEQ ID NO: 1647 - DNA, 16 bp, synthetic construct
  misc_feature 1..16: note = Synthetic oligonucleotide
  source 1..16: mol_type = other DNA
gcagttttgtaagtgc

SEQ ID NO: 1648 - DNA, 16 bp, synthetic construct
  misc_feature 1..16: note = Synthetic oligonucleotide
  source 1..16: mol_type = other DNA
tcggagacctccctaa

SEQ ID NO: 1649 - DNA, 16 bp, synthetic construct
  misc_feature 1..16: note = Synthetic oligonucleotide
  source 1..16: mol_type = other DNA
tgggcaaggctaagtt

SEQ ID NO: 1650 - DNA, 16 bp, synthetic construct
  misc_feature 1..16: note = Synthetic oligonucleotide
  source 1..16: mol_type = other DNA
actccacaccttaatt

SEQ ID NO: 1651 - DNA, 16 bp, synthetic construct
  misc_feature 1..16: note = Synthetic oligonucleotide
  source 1..16: mol_type = other DNA
tggtacaaaactgcat

SEQ ID NO: 1652 - DNA, 16 bp, synthetic construct
  misc_feature 1..16: note = Synthetic oligonucleotide
  source 1..16: mol_type = other DNA
ctcactaaaccccaca

SEQ ID NO: 1653 - DNA, 16 bp, synthetic construct
  misc_feature 1..16: note = Synthetic oligonucleotide
  source 1..16: mol_type = other DNA
ccagtgagatccaact

SEQ ID NO: 1654 - DNA, 16 bp, synthetic construct
  misc_feature 1..16: note = Synthetic oligonucleotide
  source 1..16: mol_type = other DNA
gatgggcccacaggat

SEQ ID NO: 1655 - DNA, 16 bp, synthetic construct
  misc_feature 1..16: note = Synthetic oligonucleotide
  source 1..16: mol_type = other DNA
gtacttctgttagata

SEQ ID NO: 1656 - DNA, 16 bp, synthetic construct
  misc_feature 1..16: note = Synthetic oligonucleotide
  source 1..16: mol_type = other DNA
gctgtaaccccctgaa

SEQ ID NO: 1657 - DNA, 16 bp, synthetic construct
  misc_feature 1..16: note = Synthetic oligonucleotide
  source 1..16: mol_type = other DNA
gccctgaaacattcct

SEQ ID NO: 1658 - DNA, 16 bp, synthetic construct
  misc_feature 1..16: note = Synthetic oligonucleotide
  source 1..16: mol_type = other DNA
aacccaggtttggatg

SEQ ID NO: 1659 - DNA, 16 bp, synthetic construct
  misc_feature 1..16: note = Synthetic oligonucleotide
  source 1..16: mol_type = other DNA
cgtggcaactctgtaa

SEQ ID NO: 1660 - DNA, 16 bp, synthetic construct
  misc_feature 1..16: note = Synthetic oligonucleotide
  source 1..16: mol_type = other DNA
tcggctgagtgctctc

SEQ ID NO: 1661 - DNA, 16 bp, synthetic construct
  misc_feature 1..16: note = Synthetic oligonucleotide
  source 1..16: mol_type = other DNA
cagggtacacggctct

SEQ ID NO: 1662 - DNA, 16 bp, synthetic construct
  misc_feature 1..16: note = Synthetic oligonucleotide
  source 1..16: mol_type = other DNA
tggtcttgggcactct

SEQ ID NO: 1663 - DNA, 16 bp, synthetic construct
  misc_feature 1..16: note = Synthetic oligonucleotide
  source 1..16: mol_type = other DNA
atagcttacctgtggg

SEQ ID NO: 1664 - DNA, 16 bp, synthetic construct
  misc_feature 1..16: note = Synthetic oligonucleotide
  source 1..16: mol_type = other DNA
tcaccgcccaaaacca

SEQ ID NO: 1665 - DNA, 16 bp, synthetic construct
  misc_feature 1..16: note = Synthetic oligonucleotide
  source 1..16: mol_type = other DNA
ccgtgcacacacaaga

SEQ ID NO: 1666 - DNA, 16 bp, synthetic construct
  misc_feature 1..16: note = Synthetic oligonucleotide
  source 1..16: mol_type = other DNA
gatctgggaattatgg

SEQ ID NO: 1667 - DNA, 16 bp, synthetic construct
  misc_feature 1..16: note = Synthetic oligonucleotide
  source 1..16: mol_type = other DNA
agaactcaagtcagta

SEQ ID NO: 1668 - DNA, 16 bp, synthetic construct
  misc_feature 1..16: note = Synthetic oligonucleotide
  source 1..16: mol_type = other DNA
gctccctgtaatcaca

SEQ ID NO: 1669 - DNA, 16 bp, synthetic construct
  misc_feature 1..16: note = Synthetic oligonucleotide
  source 1..16: mol_type = other DNA
tgtttaggcattcaga

SEQ ID NO: 1670 - DNA, 16 bp, synthetic construct
  misc_feature 1..16: note = Synthetic oligonucleotide
  source 1..16: mol_type = other DNA
tgaaattattggttca

SEQ ID NO: 1671 - DNA, 16 bp, synthetic construct
  misc_feature 1..16: note = Synthetic oligonucleotide
  source 1..16: mol_type = other DNA
gcctgttgggtcaaac

SEQ ID NO: 1672 - DNA, 16 bp, synthetic construct
  misc_feature 1..16: note = Synthetic oligonucleotide
  source 1..16: mol_type = other DNA
accaacatgaagtgag

SEQ ID NO: 1673 - DNA, 16 bp, synthetic construct
  misc_feature 1..16: note = Synthetic oligonucleotide
  source 1..16: mol_type = other DNA
ccttttggcaccttca

SEQ ID NO: 1674 - DNA, 16 bp, synthetic construct
  misc_feature 1..16: note = Synthetic oligonucleotide
  source 1..16: mol_type = other DNA
ctattagagggctagt

SEQ ID NO: 1675 - DNA, 16 bp, synthetic construct
  misc_feature 1..16: note = Synthetic oligonucleotide
  source 1..16: mol_type = other DNA
tttaaactcaggtgac

SEQ ID NO: 1676 - DNA, 16 bp, synthetic construct
  misc_feature 1..16: note = Synthetic oligonucleotide
  source 1..16: mol_type = other DNA
tatggagtcattagtg

SEQ ID NO: 1677 - DNA, 16 bp, synthetic construct
  misc_feature 1..16: note = Synthetic oligonucleotide
  source 1..16: mol_type = other DNA
ataacagccattgcat

SEQ ID NO: 1678 - DNA, 16 bp, synthetic construct
  misc_feature 1..16: note = Synthetic oligonucleotide
  source 1..16: mol_type = other DNA
gttttgttgcaccctc

SEQ ID NO: 1679 - DNA, 16 bp, synthetic construct
  misc_feature 1..16: note = Synthetic oligonucleotide
  source 1..16: mol_type = other DNA
attctgtgtgctcact

SEQ ID NO: 1680 - DNA, 16 bp, synthetic construct
  misc_feature 1..16: note = Synthetic oligonucleotide
  source 1..16: mol_type = other DNA
cagattctgtgtgctc

SEQ ID NO: 1681 - DNA, 16 bp, synthetic construct
  misc_feature 1..16: note = Synthetic oligonucleotide
  source 1..16: mol_type = other DNA
gtcagcaggagtagca

SEQ ID NO: 1682 - DNA, 16 bp, synthetic construct
  misc_feature 1..16: note = Synthetic oligonucleotide
  source 1..16: mol_type = other DNA
cagtcagcaggagtag

SEQ ID NO: 1683 - DNA, 16 bp, synthetic construct
  misc_feature 1..16: note = Synthetic oligonucleotide
  source 1..16: mol_type = other DNA
tcagtcagcaggagta

SEQ ID NO: 1684 - DNA, 16 bp, synthetic construct
  misc_feature 1..16: note = Synthetic oligonucleotide
  source 1..16: mol_type = other DNA
ctcattatcagtcagc

SEQ ID NO: 1685 - DNA, 16 bp, synthetic construct
  misc_feature 1..16: note = Synthetic oligonucleotide
  source 1..16: mol_type = other DNA
caggcctcattatcag

SEQ ID NO: 1686 - DNA, 16 bp, synthetic construct
  misc_feature 1..16: note = Synthetic oligonucleotide
  source 1..16: mol_type = other DNA
ccaggcctcattatca

SEQ ID NO: 1687 - DNA, 16 bp, synthetic construct
  misc_feature 1..16: note = Synthetic oligonucleotide
  source 1..16: mol_type = other DNA
tccaggcctcattatc

SEQ ID NO: 1688 - DNA, 16 bp, synthetic construct
  misc_feature 1..16: note = Synthetic oligonucleotide
  source 1..16: mol_type = other DNA
ttccaggcctcattat

SEQ ID NO: 1689 - DNA, 16 bp, synthetic construct
  misc_feature 1..16: note = Synthetic oligonucleotide
  source 1..16: mol_type = other DNA
gttccaggcctcatta

SEQ ID NO: 1690 - DNA, 16 bp, synthetic construct
  misc_feature 1..16: note = Synthetic oligonucleotide
  source 1..16: mol_type = other DNA
cgttccaggcctcatt

SEQ ID NO: 1691 - DNA, 16 bp, synthetic construct
  misc_feature 1..16: note = Synthetic oligonucleotide
  source 1..16: mol_type = other DNA
ccgttccaggcctcat

SEQ ID NO: 1692 - DNA, 16 bp, synthetic construct
  misc_feature 1..16: note = Synthetic oligonucleotide
  source 1..16: mol_type = other DNA
tccgttccaggcctca

SEQ ID NO: 1693 - DNA, 16 bp, synthetic construct
  misc_feature 1..16: note = Synthetic oligonucleotide
  source 1..16: mol_type = other DNA
aatccgttccaggcct

SEQ ID NO: 1694 - DNA, 16 bp, synthetic construct
  misc_feature 1..16: note = Synthetic oligonucleotide
  source 1..16: mol_type = other DNA
gaatccgttccaggcc

SEQ ID NO: 1695 - DNA, 16 bp, synthetic construct
  misc_feature 1..16: note = Synthetic oligonucleotide
  source 1..16: mol_type = other DNA
cgaatccgttccaggc

SEQ ID NO: 1696 - DNA, 16 bp, synthetic construct
  misc_feature 1..16: note = Synthetic oligonucleotide
  source 1..16: mol_type = other DNA
acgaatccgttccagg

SEQ ID NO: 1697 - DNA, 16 bp, synthetic construct
  misc_feature 1..16: note = Synthetic oligonucleotide
  source 1..16: mol_type = other DNA
cacgaatccgttccag

SEQ ID NO: 1698 - DNA, 16 bp, synthetic construct
  misc_feature 1..16: note = Synthetic oligonucleotide
  source 1..16: mol_type = other DNA
gccacgaatccgttcc

SEQ ID NO: 1699 - DNA, 16 bp, synthetic construct
  misc_feature 1..16: note = Synthetic oligonucleotide
  source 1..16: mol_type = other DNA
agccacgaatccgttc

SEQ ID NO: 1700 - DNA, 16 bp, synthetic construct
  misc_feature 1..16: note = Synthetic oligonucleotide
  source 1..16: mol_type = other DNA
cagccacgaatccgtt

SEQ ID NO: 1701 - DNA, 16 bp, synthetic construct
  misc_feature 1..16: note = Synthetic oligonucleotide
  source 1..16: mol_type = other DNA
gcagccacgaatccgt

SEQ ID NO: 1702 - DNA, 16 bp, synthetic construct
  misc_feature 1..16: note = Synthetic oligonucleotide
  source 1..16: mol_type = other DNA
agcagccacgaatccg

SEQ ID NO: 1703 - DNA, 16 bp, synthetic construct
  misc_feature 1..16: note = Synthetic oligonucleotide
  source 1..16: mol_type = other DNA
tcctgggcagttcagc

SEQ ID NO: 1704 - DNA, 16 bp, synthetic construct
  misc_feature 1..16: note = Synthetic oligonucleotide
  source 1..16: mol_type = other DNA
attcctgggcagttca

SEQ ID NO: 1705 - DNA, 16 bp, synthetic construct
  misc_feature 1..16: note = Synthetic oligonucleotide
  source 1..16: mol_type = other DNA
tcattcctgggcagtt

SEQ ID NO: 1706 - DNA, 16 bp, synthetic construct
  misc_feature 1..16: note = Synthetic oligonucleotide
  source 1..16: mol_type = other DNA
gtccagagctttacgg

SEQ ID NO: 1707 - DNA, 16 bp, synthetic construct
  misc_feature 1..16: note = Synthetic oligonucleotide
  source 1..16: mol_type = other DNA
gttgtccagagcttta

SEQ ID NO: 1708 - DNA, 16 bp, synthetic construct
  misc_feature 1..16: note = Synthetic oligonucleotide
  source 1..16: mol_type = other DNA
ggttgtccagagcttt

SEQ ID NO: 1709 - DNA, 16 bp, synthetic construct
  misc_feature 1..16: note = Synthetic oligonucleotide
  source 1..16: mol_type = other DNA
aggttgtccagagctt

SEQ ID NO: 1710 - DNA, 16 bp, synthetic construct
  misc_feature 1..16: note = Synthetic oligonucleotide
  source 1..16: mol_type = other DNA
aaggttgtccagagct

SEQ ID NO: 1711 - DNA, 16 bp, synthetic construct
  misc_feature 1..16: note = Synthetic oligonucleotide
  source 1..16: mol_type = other DNA
caaggttgtccagagc

SEQ ID NO: 1712 - DNA, 16 bp, synthetic construct
  misc_feature 1..16: note = Synthetic oligonucleotide
  source 1..16: mol_type = other DNA
gcaaggttgtccagag

SEQ ID NO: 1713 - DNA, 16 bp, synthetic construct
  misc_feature 1..16: note = Synthetic oligonucleotide
  source 1..16: mol_type = other DNA
tgtcttgcaaggttgt

SEQ ID NO: 1714 - DNA, 16 bp, synthetic construct
  misc_feature 1..16: note = Synthetic oligonucleotide
  source 1..16: mol_type = other DNA
ttgtcttgcaaggttg

SEQ ID NO: 1715 - DNA, 16 bp, synthetic construct
  misc_feature 1..16: note = Synthetic oligonucleotide
  source 1..16: mol_type = other DNA
tgttatcctcaagctc

SEQ ID NO: 1716 - DNA, 16 bp, synthetic construct
  misc_feature 1..16: note = Synthetic oligonucleotide
  source 1..16: mol_type = other DNA
gcctgcagaatcttat

SEQ ID NO: 1717 - DNA, 16 bp, synthetic construct
  misc_feature 1..16: note = Synthetic oligonucleotide
  source 1..16: mol_type = other DNA
cccctgccaggcatat

SEQ ID NO: 1718 - DNA, 16 bp, synthetic construct
  misc_feature 1..16: note = Synthetic oligonucleotide
  source 1..16: mol_type = other DNA
tgggtcaaaagcgatg

SEQ ID NO: 1719 - DNA, 16 bp, synthetic construct
  misc_feature 1..16: note = Synthetic oligonucleotide
  source 1..16: mol_type = other DNA
ttattgcaggctccaa

SEQ ID NO: 1720 - DNA, 16 bp, synthetic construct
  misc_feature 1..16: note = Synthetic oligonucleotide
  source 1..16: mol_type = other DNA
ttacttaccgggtaag

SEQ ID NO: 1721 - DNA, 16 bp, synthetic construct
  misc_feature 1..16: note = Synthetic oligonucleotide
  source 1..16: mol_type = other DNA
cagcaaacacgctccc

SEQ ID NO: 1722 - DNA, 16 bp, synthetic construct
  misc_feature 1..16: note = Synthetic oligonucleotide
  source 1..16: mol_type = other DNA
ggccgtgtcaccctaa

SEQ ID NO: 1723 - DNA, 16 bp, synthetic construct
  misc_feature 1..16: note = Synthetic oligonucleotide
  source 1..16: mol_type = other DNA
ggccaggtagccgtgt

SEQ ID NO: 1724 - DNA, 16 bp, synthetic construct
  misc_feature 1..16: note = Synthetic oligonucleotide
  source 1..16: mol_type = other DNA
gctgggtctgacccac

SEQ ID NO: 1725 - DNA, 16 bp, synthetic construct
  misc_feature 1..16: note = Synthetic oligonucleotide
  source 1..16: mol_type = other DNA
aaggagttgctgaaac

SEQ ID NO: 1726 - DNA, 16 bp, synthetic construct
  misc_feature 1..16: note = Synthetic oligonucleotide
  source 1..16: mol_type = other DNA
gcaggttcacatgaca

SEQ ID NO: 1727 - DNA, 16 bp, synthetic construct
  misc_feature 1..16: note = Synthetic oligonucleotide
  source 1..16: mol_type = other DNA
tctgttagatacaaac

SEQ ID NO: 1728 - DNA, 16 bp, synthetic construct
  misc_feature 1..16: note = Synthetic oligonucleotide
  source 1..16: mol_type = other DNA
tgggaaactcaactgg

SEQ ID NO: 1729 - DNA, 16 bp, synthetic construct
  misc_feature 1..16: note = Synthetic oligonucleotide
  source 1..16: mol_type = other DNA
tggatggaaggaacct

SEQ ID NO: 1730 - DNA, 16 bp, synthetic construct
  misc_feature 1..16: note = Synthetic oligonucleotide
  source 1..16: mol_type = other DNA
cattcagaatttccac

SEQ ID NO: 1731 - DNA, 16 bp, synthetic construct
  misc_feature 1..16: note = Synthetic oligonucleotide
  source 1..16: mol_type = other DNA
cccaccattgatgggt

SEQ ID NO: 1732 - DNA, 16 bp, synthetic construct
  misc_feature 1..16: note = Synthetic oligonucleotide
  source 1..16: mol_type = other DNA
tcactatcgatcaaat

SEQ ID NO: 1733 - DNA, 16 bp, synthetic construct
  misc_feature 1..16: note = Synthetic oligonucleotide
  source 1..16: mol_type = other DNA
cactttacatgcacga

SEQ ID NO: 1734 - DNA, 16 bp, synthetic construct
  misc_feature 1..16: note = Synthetic oligonucleotide
  source 1..16: mol_type = other DNA
tcatcatagatactcc

SEQ ID NO: 1735 - DNA, 16 bp, synthetic construct
  misc_feature 1..16: note = Synthetic oligonucleotide
  source 1..16: mol_type = other DNA
ggaggtgtgcctgtca

SEQ ID NO: 1736 - DNA, 16 bp, synthetic construct
  misc_feature 1..16: note = Synthetic oligonucleotide
  source 1..16: mol_type = other DNA
gctactcactgccagc

SEQ ID NO: 1737 - DNA, 16 bp, synthetic construct
  misc_feature 1..16: note = Synthetic oligonucleotide
  source 1..16: mol_type = other DNA
agaaatgaccctgttc

SEQ ID NO: 1738 - DNA, 16 bp, synthetic construct
  misc_feature 1..16: note = Synthetic oligonucleotide
  source 1..16: mol_type = other DNA
cacgatctcatttttc

SEQ ID NO: 1739 - DNA, 16 bp, synthetic construct
  misc_feature 1..16: note = Synthetic oligonucleotide
  source 1..16: mol_type = other DNA
atgcacgatctcattt

SEQ ID NO: 1740 - DNA, 16 bp, synthetic construct
  misc_feature 1..16: note = Synthetic oligonucleotide
  source 1..16: mol_type = other DNA
acatgcacgatctcat

SEQ ID NO: 1741 - DNA, 16 bp, synthetic construct
  misc_feature 1..16: note = Synthetic oligonucleotide
  source 1..16: mol_type = other DNA
tttacatgcacgatct

SEQ ID NO: 1742 - DNA, 16 bp, synthetic construct
  misc_feature 1..16: note = Synthetic oligonucleotide
  source 1..16: mol_type = other DNA
actttacatgcacgat

SEQ ID NO: 1743 - DNA, 16 bp, synthetic construct
  misc_feature 1..16: note = Synthetic oligonucleotide
  source 1..16: mol_type = other DNA
gtgtcagtcattatgc

SEQ ID NO: 1744 - DNA, 16 bp, synthetic construct
  misc_feature 1..16: note = Synthetic oligonucleotide
  source 1..16: mol_type = other DNA
gttaactgtgcaccta

SEQ ID NO: 1745 - DNA, 16 bp, synthetic construct
  misc_feature 1..16: note = Synthetic oligonucleotide
  source 1..16: mol_type = other DNA
agcttgtaagatgtta

SEQ ID NO: 1746 - DNA, 16 bp, synthetic construct
  misc_feature 1..16: note = Synthetic oligonucleotide
  source 1..16: mol_type = other DNA
gaagatccttaaccct

SEQ ID NO: 1747 - DNA, 16 bp, synthetic construct
  misc_feature 1..16: note = Synthetic oligonucleotide
  source 1..16: mol_type = other DNA
acattggttaggtcag

SEQ ID NO: 1748 - DNA, 16 bp, synthetic construct
  misc_feature 1..16: note = Synthetic oligonucleotide
  source 1..16: mol_type = other DNA
acacattggttaggtc

SEQ ID NO: 1749 - DNA, 16 bp, synthetic construct
  misc_feature 1..16: note = Synthetic oligonucleotide
  source 1..16: mol_type = other DNA
ggaattcctcagatga

SEQ ID NO: 1750 - DNA, 16 bp, synthetic construct
  misc_feature 1..16: note = Synthetic oligonucleotide
  source 1..16: mol_type = other DNA
gtttatggaattcctc

SEQ ID NO: 1751 - DNA, 16 bp, synthetic construct
  misc_feature 1..16: note = Synthetic oligonucleotide
  source 1..16: mol_type = other DNA
ggtcctgccgtgttta

SEQ ID NO: 1752 - DNA, 16 bp, synthetic construct
  misc_feature 1..16: note = Synthetic oligonucleotide
  source 1..16: mol_type = other DNA
tcctatcacattgagt

SEQ ID NO: 1753 - DNA, 16 bp, synthetic construct
  misc_feature 1..16: note = Synthetic oligonucleotide
  source 1..16: mol_type = other DNA
tgcctctaaggccttc

SEQ ID NO: 1754 - DNA, 16 bp, synthetic construct
  misc_feature 1..16: note = Synthetic oligonucleotide
  source 1..16: mol_type = other DNA
atcttggtgttggttc

SEQ ID NO: 1755 - DNA, 16 bp, synthetic construct
  misc_feature 1..16: note = Synthetic oligonucleotide
  source 1..16: mol_type = other DNA
ttaagtttcaagccct

SEQ ID NO: 1756 - DNA, 16 bp, synthetic construct
  misc_feature 1..16: note = Synthetic oligonucleotide
  source 1..16: mol_type = other DNA
gttcatgacctcctta

SEQ ID NO: 1757 - DNA, 16 bp, synthetic construct
  misc_feature 1..16: note = Synthetic oligonucleotide
  source 1..16: mol_type = other DNA
gtcctctgcaagttca

SEQ ID NO: 1758 - DNA, 16 bp, synthetic construct
  misc_feature 1..16: note = Synthetic oligonucleotide
  source 1..16: mol_type = other DNA
gatcatccagacaggg

SEQ ID NO: 1759 - DNA, 16 bp, synthetic construct
  misc_feature 1..16: note = Synthetic oligonucleotide
  source 1..16: mol_type = other DNA
gaacttgccagttcca

SEQ ID NO: 1760 - DNA, 16 bp, synthetic construct
  misc_feature 1..16: note = Synthetic oligonucleotide
  source 1..16: mol_type = other DNA
tgcttgtcaatgtcag

SEQ ID NO: 1761 - DNA, 16 bp, synthetic construct
  misc_feature 1..16: note = Synthetic oligonucleotide
  source 1..16: mol_type = other DNA
agacatactgcttgtc

SEQ ID NO: 1762 - DNA, 16 bp, synthetic construct
  misc_feature 1..16: note = Synthetic oligonucleotide
  source 1..16: mol_type = other DNA
tactatgaaaatggtc

SEQ ID NO: 1763 - DNA, 16 bp, synthetic construct
  misc_feature 1..16: note = Synthetic oligonucleotide
  source 1..16: mol_type = other DNA
agcaactaattctact

SEQ ID NO: 1764 - DNA, 16 bp, synthetic construct
  misc_feature 1..16: note = Synthetic oligonucleotide
  source 1..16: mol_type = other DNA
acaaattggcagcaac

SEQ ID NO: 1765 - DNA, 16 bp, synthetic construct
  misc_feature 1..16: note = Synthetic oligonucleotide
  source 1..16: mol_type = other DNA
acacaaattggcagca

SEQ ID NO: 1766 - DNA, 16 bp, synthetic construct
  misc_feature 1..16: note = Synthetic oligonucleotide
  source 1..16: mol_type = other DNA
cacctatataaattgc

SEQ ID NO: 1767 - DNA, 16 bp, synthetic construct
  misc_feature 1..16: note = Synthetic oligonucleotide
  source 1..16: mol_type = other DNA
gcaattttatggaacc

SEQ ID NO: 1768 - DNA, 16 bp, synthetic construct
  misc_feature 1..16: note = Synthetic oligonucleotide
  source 1..16: mol_type = other DNA
cttagtagtgacagct

SEQ ID NO: 1769 - DNA, 16 bp, synthetic construct
  misc_feature 1..16: note = Synthetic oligonucleotide
  source 1..16: mol_type = other DNA
agcctaactgatgcct

SEQ ID NO: 1770 - DNA, 16 bp, synthetic construct
  misc_feature 1..16: note = Synthetic oligonucleotide
  source 1..16: mol_type = other DNA
ggtctcactcgcaggt

SEQ ID NO: 1771 - DNA, 16 bp, synthetic construct
  misc_feature 1..16: note = Synthetic oligonucleotide
  source 1..16: mol_type = other DNA
ggctattcattctggc

SEQ ID NO: 1772 - DNA, 16 bp, synthetic construct
  misc_feature 1..16: note = Synthetic oligonucleotide
  source 1..16: mol_type = other DNA
ggagatctggctattc

SEQ ID NO: 1773 - DNA, 16 bp, synthetic construct
  misc_feature 1..16: note = Synthetic oligonucleotide
  source 1..16: mol_type = other DNA
gctactggttctggcc

SEQ ID NO: 1774 - DNA, 16 bp, synthetic construct
  misc_feature 1..16: note = Synthetic oligonucleotide
  source 1..16: mol_type = other DNA
gagtactttgaattca

SEQ ID NO: 1775 - DNA, 16 bp, synthetic construct
  misc_feature 1..16: note = Synthetic oligonucleotide
  source 1..16: mol_type = other DNA
gtctggctatctctga

SEQ ID NO: 1776 - DNA, 16 bp, synthetic construct
  misc_feature 1..16: note = Synthetic oligonucleotide
  source 1..16: mol_type = other DNA
agacattgcagtctgg

SEQ ID NO: 1777 - DNA, 16 bp, synthetic construct
  misc_feature 1..16: note = Synthetic oligonucleotide
  source 1..16: mol_type = other DNA
taaatttgcaggtggt

SEQ ID NO: 1778 - DNA, 16 bp, synthetic construct
  misc_feature 1..16: note = Synthetic oligonucleotide
  source 1..16: mol_type = other DNA
cttaaatttgcaggtg

SEQ ID NO: 1779 - DNA, 16 bp, synthetic construct
  misc_feature 1..16: note = Synthetic oligonucleotide
  source 1..16: mol_type = other DNA
ggatttagaaatcccc

SEQ ID NO: 1780 - DNA, 16 bp, synthetic construct
  misc_feature 1..16: note = Synthetic oligonucleotide
  source 1..16: mol_type = other DNA
tgtgttctttccgtgt

SEQ ID NO: 1781 - DNA, 16 bp, synthetic construct
  misc_feature 1..16: note = Synthetic oligonucleotide
  source 1..16: mol_type = other DNA
gacaatgaagcttcac

SEQ ID NO: 1782 - DNA, 16 bp, synthetic construct
  misc_feature 1..16: note = Synthetic oligonucleotide
  source 1..16: mol_type = other DNA
ttaactgggtgagctt

SEQ ID NO: 1783 - DNA, 16 bp, synthetic construct
  misc_feature 1..16: note = Synthetic oligonucleotide
  source 1..16: mol_type = other DNA
taatgtgattcacagg

SEQ ID NO: 1784 - DNA, 16 bp, synthetic construct
  misc_feature 1..16: note = Synthetic oligonucleotide
  source 1..16: mol_type = other DNA
ggtttaatgtgattca

SEQ ID NO: 1785 - DNA, 16 bp, synthetic construct
  misc_feature 1..16: note = Synthetic oligonucleotide
  source 1..16: mol_type = other DNA
cctgaaaaaaggcttc

SEQ ID NO: 1786 - DNA, 16 bp, synthetic construct
  misc_feature 1..16: note = Synthetic oligonucleotide
  source 1..16: mol_type = other DNA
tgtaacaacaatcctg

SEQ ID NO: 1787 - DNA, 16 bp, synthetic construct
  misc_feature 1..16: note = Synthetic oligonucleotide
  source 1..16: mol_type = other DNA
ttactatatttggagc

SEQ ID NO: 1788 - DNA, 16 bp, synthetic construct
  misc_feature 1..16: note = Synthetic oligonucleotide
  source 1..16: mol_type = other DNA
tgtctcctatcagtcc

SEQ ID NO: 1789 - DNA, 16 bp, synthetic construct
  misc_feature 1..16: note = Synthetic oligonucleotide
  source 1..16: mol_type = other DNA
caatttagcaggaacc

SEQ ID NO: 1790 - DNA, 16 bp, synthetic construct
  misc_feature 1..16: note = Synthetic oligonucleotide
  source 1..16: mol_type = other DNA
gattatgctcttcacc

SEQ ID NO: 1791 - DNA, 16 bp, synthetic construct
  misc_feature 1..16: note = Synthetic oligonucleotide
  source 1..16: mol_type = other DNA
tatctgattatgctct

SEQ ID NO: 1792 - DNA, 16 bp, synthetic construct
  misc_feature 1..16: note = Synthetic oligonucleotide
  source 1..16: mol_type = other DNA
tgattacgctttgcta

SEQ ID NO: 1793 - DNA, 16 bp, synthetic construct
  misc_feature 1..16: note = Synthetic oligonucleotide
  source 1..16: mol_type = other DNA
tctgattacgctttgc

SEQ ID NO: 1794 - DNA, 16 bp, synthetic construct
  misc_feature 1..16: note = Synthetic oligonucleotide
  source 1..16: mol_type = other DNA
agatactctggacact

SEQ ID NO: 1795 - DNA, 16 bp, synthetic construct
  misc_feature 1..16: note = Synthetic oligonucleotide
  source 1..16: mol_type = other DNA
ggcagcttgtgatcca

SEQ ID NO: 1796 - DNA, 16 bp, synthetic construct
  misc_feature 1..16: note = Synthetic oligonucleotide
  source 1..16: mol_type = other DNA
ccgtataggaatctga

SEQ ID NO: 1797 - DNA, 16 bp, synthetic construct
  misc_feature 1..16: note = Synthetic oligonucleotide
  source 1..16: mol_type = other DNA
ggtgatttggccacgg

SEQ ID NO: 1798 - DNA, 16 bp, synthetic construct
  misc_feature 1..16: note = Synthetic oligonucleotide
  source 1..16: mol_type = other DNA
agtgatctccaggccc

SEQ ID NO: 1799 - DNA, 16 bp, synthetic construct
  misc_feature 1..16: note = Synthetic oligonucleotide
  source 1..16: mol_type = other DNA
gtgactgccaaagtgt

SEQ ID NO: 1800 - DNA, 16 bp, synthetic construct
  misc_feature 1..16: note = Synthetic oligonucleotide
  source 1..16: mol_type = other DNA
ttgataaagatgcctc

SEQ ID NO: 1801 - DNA, 16 bp, synthetic construct
  misc_feature 1..16: note = Synthetic oligonucleotide
  source 1..16: mol_type = other DNA
tttcatggtaggtgtt

SEQ ID NO: 1802 - DNA, 16 bp, synthetic construct
  misc_feature 1..16: note = Synthetic oligonucleotide
  source 1..16: mol_type = other DNA
atactcctcaatattt

SEQ ID NO: 1803 - DNA, 16 bp, synthetic construct
  misc_feature 1..16: note = Synthetic oligonucleotide
  source 1..16: mol_type = other DNA
tagatactcctcaata

SEQ ID NO: 1804 - DNA, 16 bp, synthetic construct
  misc_feature 1..16: note = Synthetic oligonucleotide
  source 1..16: mol_type = other DNA
catcatagatactcct

SEQ ID NO: 1805 - DNA, 16 bp, synthetic construct
  misc_feature 1..16: note = Synthetic oligonucleotide
  source 1..16: mol_type = other DNA
gttcatcatagatact

SEQ ID NO: 1806 - DNA, 16 bp, synthetic construct
  misc_feature 1..16: note = Synthetic oligonucleotide
  source 1..16: mol_type = other DNA
gatctctatcctgtgt

SEQ ID NO: 1807 - DNA, 16 bp, synthetic construct
  misc_feature 1..16: note = Synthetic oligonucleotide
  source 1..16: mol_type = other DNA
gactcgaacaagtcca

SEQ ID NO: 1808 - DNA, 16 bp, synthetic construct
  misc_feature 1..16: note = Synthetic oligonucleotide
  source 1..16: mol_type = other DNA
cttcatcggtccatcg

SEQ ID NO: 1809 - DNA, 16 bp, synthetic construct
  misc_feature 1..16: note = Synthetic oligonucleotide
  source 1..16: mol_type = other DNA
tccaggtacccttcta

SEQ ID NO: 1810 - DNA, 16 bp, synthetic construct
  misc_feature 1..16: note = Synthetic oligonucleotide
  source 1..16: mol_type = other DNA
agacatcaccttgtcc

SEQ ID NO: 1811 - DNA, 16 bp, synthetic construct
  misc_feature 1..16: note = Synthetic oligonucleotide
  source 1..16: mol_type = other DNA
attcttcctggagtgc

SEQ ID NO: 1812 - DNA, 16 bp, synthetic construct
  misc_feature 1..16: note = Synthetic oligonucleotide
  source 1..16: mol_type = other DNA
tgaggctactcactgc

SEQ ID NO: 1813 - DNA, 16 bp, synthetic construct
  misc_feature 1..16: note = Synthetic oligonucleotide
  source 1..16: mol_type = other DNA
gtaactggcaaagttc

SEQ ID NO: 1814 - DNA, 16 bp, synthetic construct
  misc_feature 1..16: note = Synthetic oligonucleotide
  source 1..16: mol_type = other DNA
tgcacgatctcatttt

SEQ ID NO: 1815 - DNA, 16 bp, synthetic construct
  misc_feature 1..16: note = Synthetic oligonucleotide
  source 1..16: mol_type = other DNA
catgcacgatctcatt

SEQ ID NO: 1816 - DNA, 16 bp, synthetic construct
  misc_feature 1..16: note = Synthetic oligonucleotide
  source 1..16: mol_type = other DNA
tacatgcacgatctca

SEQ ID NO: 1817 - DNA, 16 bp, synthetic construct
  misc_feature 1..16: note = Synthetic oligonucleotide
  source 1..16: mol_type = other DNA
ctttacatgcacgatc

SEQ ID NO: 1818 - DNA, 16 bp, synthetic construct
  misc_feature 1..16: note = Synthetic oligonucleotide
  source 1..16: mol_type = other DNA
gcactttacatgcacg

SEQ ID NO: 1819 - DNA, 16 bp, synthetic construct
  misc_feature 1..16: note = Synthetic oligonucleotide
  source 1..16: mol_type = other DNA
gtgtgtcagtcattat

SEQ ID NO: 1820 - DNA, 16 bp, synthetic construct
  misc_feature 1..16: note = Synthetic oligonucleotide
  source 1..16: mol_type = other DNA
cgttaactgtgcacct

SEQ ID NO: 1821 - DNA, 16 bp, synthetic construct
  misc_feature 1..16: note = Synthetic oligonucleotide
  source 1..16: mol_type = other DNA
tccttaaccctggttc

SEQ ID NO: 1822 - DNA, 16 bp, synthetic construct
  misc_feature 1..16: note = Synthetic oligonucleotide
  source 1..16: mol_type = other DNA
tcaagaagaagatcct

SEQ ID NO: 1823 - DNA, 16 bp, synthetic construct
  misc_feature 1..16: note = Synthetic oligonucleotide
  source 1..16: mol_type = other DNA
cacattggttaggtca

SEQ ID NO: 1824 - DNA, 16 bp, synthetic construct
  misc_feature 1..16: note = Synthetic oligonucleotide
  source 1..16: mol_type = other DNA
acacacattggttagg

SEQ ID NO: 1825 - DNA, 16 bp, synthetic construct
  misc_feature 1..16: note = Synthetic oligonucleotide
  source 1..16: mol_type = other DNA
tatggaattcctcaga

SEQ ID NO: 1826 - DNA, 16 bp, synthetic construct
  misc_feature 1..16: note = Synthetic oligonucleotide
  source 1..16: mol_type = other DNA
cgtgtttatggaattc

SEQ ID NO: 1827 - DNA, 16 bp, synthetic construct
  misc_feature 1..16: note = Synthetic oligonucleotide
  source 1..16: mol_type = other DNA
tcacattgagttgcta

SEQ ID NO: 1828 - DNA, 16 bp, synthetic construct
  misc_feature 1..16: note = Synthetic oligonucleotide
  source 1..16: mol_type = other DNA
gcctctaaggccttca

SEQ ID NO: 1829 - DNA, 16 bp, synthetic construct
  misc_feature 1..16: note = Synthetic oligonucleotide
  source 1..16: mol_type = other DNA
ggtgttggttccccac

SEQ ID NO: 1830 - DNA, 16 bp, synthetic construct
  misc_feature 1..16: note = Synthetic oligonucleotide
  source 1..16: mol_type = other DNA
gctgatcccggtctct

SEQ ID NO: 1831 - DNA, 16 bp, synthetic construct
  misc_feature 1..16: note = Synthetic oligonucleotide
  source 1..16: mol_type = other DNA
tccttaagtttcaagc

SEQ ID NO: 1832 - DNA, 16 bp, synthetic construct
  misc_feature 1..16: note = Synthetic oligonucleotide
  source 1..16: mol_type = other DNA
tgcaagttcatgacct

SEQ ID NO: 1833 - DNA, 16 bp, synthetic construct
  misc_feature 1..16: note = Synthetic oligonucleotide
  source 1..16: mol_type = other DNA
gaaatatccctctccc

SEQ ID NO: 1834 - DNA, 16 bp, synthetic construct
  misc_feature 1..16: note = Synthetic oligonucleotide
  source 1..16: mol_type = other DNA
ccctatatgcccatga

SEQ ID NO: 1835 - DNA, 16 bp, synthetic construct
  misc_feature 1..16: note = Synthetic oligonucleotide
  source 1..16: mol_type = other DNA
agaacttgccagttcc

SEQ ID NO: 1836 - DNA, 16 bp, synthetic construct
  misc_feature 1..16: note = Synthetic oligonucleotide
  source 1..16: mol_type = other DNA
gacatactgcttgtca

SEQ ID NO: 1837 - DNA, 16 bp, synthetic construct
  misc_feature 1..16: note = Synthetic oligonucleotide
  source 1..16: mol_type = other DNA
gtcactaagacatact

SEQ ID NO: 1838 - DNA, 16 bp, synthetic construct
  misc_feature 1..16: note = Synthetic oligonucleotide
  source 1..16: mol_type = other DNA
gcaactaattctacta

SEQ ID NO: 1839 - DNA, 16 bp, synthetic construct
  misc_feature 1..16: note = Synthetic oligonucleotide
  source 1..16: mol_type = other DNA
caaattggcagcaact

SEQ ID NO: 1840 - DNA, 16 bp, synthetic construct
  misc_feature 1..16: note = Synthetic oligonucleotide
  source 1..16: mol_type = other DNA
cacaaattggcagcaa

SEQ ID NO: 1841 - DNA, 16 bp, synthetic construct
  misc_feature 1..16: note = Synthetic oligonucleotide
  source 1..16: mol_type = other DNA
acctatataaattgct

SEQ ID NO: 1842 - DNA, 16 bp, synthetic construct
  misc_feature 1..16: note = Synthetic oligonucleotide
  source 1..16: mol_type = other DNA
attttatggaacctct

SEQ ID NO: 1843 - DNA, 16 bp, synthetic construct
  misc_feature 1..16: note = Synthetic oligonucleotide
  source 1..16: mol_type = other DNA
agcttcacctgtgtgc

SEQ ID NO: 1844 - DNA, 16 bp, synthetic construct
  misc_feature 1..16: note = Synthetic oligonucleotide
  source 1..16: mol_type = other DNA
tgccttagtagtgaca

SEQ ID NO: 1845 - DNA, 16 bp, synthetic construct
  misc_feature 1..16: note = Synthetic oligonucleotide
  source 1..16: mol_type = other DNA
tcactcgcaggtgtca

SEQ ID NO: 1846 - DNA, 16 bp, synthetic construct
  misc_feature 1..16: note = Synthetic oligonucleotide
  source 1..16: mol_type = other DNA
gctattcattctggct

SEQ ID NO: 1847 - DNA, 16 bp, synthetic construct
  misc_feature 1..16: note = Synthetic oligonucleotide
  source 1..16: mol_type = other DNA
tggctattcattctgg

SEQ ID NO: 1848 - DNA, 16 bp, synthetic construct
  misc_feature 1..16: note = Synthetic oligonucleotide
  source 1..16: mol_type = other DNA
tggttctggccactgc

SEQ ID NO: 1849 - DNA, 16 bp, synthetic construct
  misc_feature 1..16: note = Synthetic oligonucleotide
  source 1..16: mol_type = other DNA
ggagttcactttgcct

SEQ ID NO: 1850 - DNA, 16 bp, synthetic construct
  misc_feature 1..16: note = Synthetic oligonucleotide
  source 1..16: mol_type = other DNA
gctatctctgagtact

SEQ ID NO: 1851 - DNA, 16 bp, synthetic construct
  misc_feature 1..16: note = Synthetic oligonucleotide
  source 1..16: mol_type = other DNA
gacattgcagtctggc

SEQ ID NO: 1852 - DNA, 16 bp, synthetic construct
  misc_feature 1..16: note = Synthetic oligonucleotide
  source 1..16: mol_type = other DNA
tcagacattgcagtct

SEQ ID NO: 1853 - DNA, 16 bp, synthetic construct
  misc_feature 1..16: note = Synthetic oligonucleotide
  source 1..16: mol_type = other DNA
ttaaatttgcaggtgg

SEQ ID NO: 1854 - DNA, 16 bp, synthetic construct
  misc_feature 1..16: note = Synthetic oligonucleotide
  source 1..16: mol_type = other DNA
cccttaaatttgcagg

SEQ ID NO: 1855 - DNA, 16 bp, synthetic construct
  misc_feature 1..16: note = Synthetic oligonucleotide
  source 1..16: mol_type = other DNA
tggatttagaaatccc

SEQ ID NO: 1856 - DNA, 16 bp, synthetic construct
  misc_feature 1..16: note = Synthetic oligonucleotide
  source 1..16: mol_type = other DNA
tgaagcttcacactta

SEQ ID NO: 1857 - DNA, 16 bp, synthetic construct
  misc_feature 1..16: note = Synthetic oligonucleotide
  source 1..16: mol_type = other DNA
aggacaatgaagcttc

SEQ ID NO: 1858 - DNA, 16 bp, synthetic construct
  misc_feature 1..16: note = Synthetic oligonucleotide
  source 1..16: mol_type = other DNA
tccttaactgggtgag

SEQ ID NO: 1859 - DNA, 16 bp, synthetic construct
  misc_feature 1..16: note = Synthetic oligonucleotide
  source 1..16: mol_type = other DNA
gtttaatgtgattcac

SEQ ID NO: 1860 - DNA, 16 bp, synthetic construct
  misc_feature 1..16: note = Synthetic oligonucleotide
  source 1..16: mol_type = other DNA
tggtttaatgtgattc

SEQ ID NO: 1861 - DNA, 16 bp, synthetic construct
  misc_feature 1..16: note = Synthetic oligonucleotide
  source 1..16: mol_type = other DNA
gtaacaacaatcctga

SEQ ID NO: 1862 - DNA, 16 bp, synthetic construct
  misc_feature 1..16: note = Synthetic oligonucleotide
  source 1..16: mol_type = other DNA
tactatatttggagct

SEQ ID NO: 1863 - DNA, 16 bp, synthetic construct
  misc_feature 1..16: note = Synthetic oligonucleotide
  source 1..16: mol_type = other DNA
gtctttactatatttg

SEQ ID NO: 1864 - DNA, 16 bp, synthetic construct
  misc_feature 1..16: note = Synthetic oligonucleotide
  source 1..16: mol_type = other DNA
aatttagcaggaaccc

SEQ ID NO: 1865 - DNA, 16 bp, synthetic construct
  misc_feature 1..16: note = Synthetic oligonucleotide
  source 1..16: mol_type = other DNA
gagaatcctgttaggc

SEQ ID NO: 1866 - DNA, 16 bp, synthetic construct
  misc_feature 1..16: note = Synthetic oligonucleotide
  source 1..16: mol_type = other DNA
tgattatgctcttcac

SEQ ID NO: 1867 - DNA, 16 bp, synthetic construct
  misc_feature 1..16: note = Synthetic oligonucleotide
  source 1..16: mol_type = other DNA
gctatctgattatgct

SEQ ID NO: 1868 - DNA, 16 bp, synthetic construct
  misc_feature 1..16: note = Synthetic oligonucleotide
  source 1..16: mol_type = other DNA
ctgattacgctttgct

SEQ ID NO: 1869 - DNA, 16 bp, synthetic construct
  misc_feature 1..16: note = Synthetic oligonucleotide
  source 1..16: mol_type = other DNA
gacactaaggcatggg

SEQ ID NO: 1870 - DNA, 16 bp, synthetic construct
  misc_feature 1..16: note = Synthetic oligonucleotide
  source 1..16: mol_type = other DNA
gcagatactctggaca

SEQ ID NO: 1871 - DNA, 16 bp, synthetic construct
  misc_feature 1..16: note = Synthetic oligonucleotide
  source 1..16: mol_type = other DNA
gggctatttggtgtct

SEQ ID NO: 1872 - DNA, 16 bp, synthetic construct
  misc_feature 1..16: note = Synthetic oligonucleotide
  source 1..16: mol_type = other DNA
tgatttggccacggga

SEQ ID NO: 1873 - DNA, 16 bp, synthetic construct
  misc_feature 1..16: note = Synthetic oligonucleotide
  source 1..16: mol_type = other DNA
gaacatctgtctttgc

SEQ ID NO: 1874 - DNA, 16 bp, synthetic construct
  misc_feature 1..16: note = Synthetic oligonucleotide
  source 1..16: mol_type = other DNA
agcatgaactttaccc

SEQ ID NO: 1875 - DNA, 16 bp, synthetic construct
  misc_feature 1..16: note = Synthetic oligonucleotide
  source 1..16: mol_type = other DNA
caggtcaacaccgtga

SEQ ID NO: 1876 - DNA, 16 bp, synthetic construct
  misc_feature 1..16: note = Synthetic oligonucleotide
  source 1..16: mol_type = other DNA
gtttgataaagatgcc

SEQ ID NO: 1877 - DNA, 16 bp, synthetic construct
  misc_feature 1..16: note = Synthetic oligonucleotide
  source 1..16: mol_type = other DNA
tactcctcaatattta

SEQ ID NO: 1878 - DNA, 16 bp, synthetic construct
  misc_feature 1..16: note = Synthetic oligonucleotide
  source 1..16: mol_type = other DNA
gatactcctcaatatt

SEQ ID NO: 1879 - DNA, 16 bp, synthetic construct
  misc_feature 1..16: note = Synthetic oligonucleotide
  source 1..16: mol_type = other DNA
atcatagatactcctc

SEQ ID NO: 1880 - DNA, 16 bp, synthetic construct
  misc_feature 1..16: note = Synthetic oligonucleotide
  source 1..16: mol_type = other DNA
ttcatcatagatactc

SEQ ID NO: 1881 - DNA, 16 bp, synthetic construct
  misc_feature 1..16: note = Synthetic oligonucleotide
  source 1..16: mol_type = other DNA
gtgtaaattgcagagc

SEQ ID NO: 1882 - DNA, 16 bp, synthetic construct
  misc_feature 1..16: note = Synthetic oligonucleotide
  source 1..16: mol_type = other DNA
tgtgaaatgagctcca

SEQ ID NO: 1883 - DNA, 16 bp, synthetic construct
  misc_feature 1..16: note = Synthetic oligonucleotide
  source 1..16: mol_type = other DNA
atgactcgaacaagtc

SEQ ID NO: 1884 - DNA, 16 bp, synthetic construct
  misc_feature 1..16: note = Synthetic oligonucleotide
  source 1..16: mol_type = other DNA
tggaacttcatcggtc

SEQ ID NO: 1885 - DNA, 16 bp, synthetic construct
  misc_feature 1..16: note = Synthetic oligonucleotide
  source 1..16: mol_type = other DNA
gacatcaccttgtcca

SEQ ID NO: 1886 - DNA, 16 bp, synthetic construct
  misc_feature 1..16: note = Synthetic oligonucleotide
  source 1..16: mol_type = other DNA
ggaagtcaggcaccca

SEQ ID NO: 1887 - DNA, 16 bp, synthetic construct
  misc_feature 1..16: note = Synthetic oligonucleotide
  source 1..16: mol_type = other DNA
tgttatatttgatcct

SEQ ID NO: 1888 - DNA, 16 bp, synthetic construct
  misc_feature 1..16: note = Synthetic oligonucleotide
  source 1..16: mol_type = other DNA
gaacgcaatgctgact

SEQ ID NO: 1889 - DNA, 16 bp, synthetic construct
  misc_feature 1..16: note = Synthetic oligonucleotide
  source 1..16: mol_type = other DNA
cagcattgagtacaac

SEQ ID NO: 1890 - DNA, 16 bp, synthetic construct
  misc_feature 1..16: note = Synthetic oligonucleotide
  source 1..16: mol_type = other DNA
ctttataccagtgtct

SEQ ID NO: 1891 - DNA, 16 bp, synthetic construct
  misc_feature 1..16: note = Synthetic oligonucleotide
  source 1..16: mol_type = other DNA
gagaacattgaaacac

SEQ ID NO: 1892 - DNA, 16 bp, synthetic construct
  misc_feature 1..16: note = Synthetic oligonucleotide
  source 1..16: mol_type = other DNA
tagtgctatagaggga

SEQ ID NO: 1893 - DNA, 16 bp, synthetic construct
  misc_feature 1..16: note = Synthetic oligonucleotide
  source 1..16: mol_type = other DNA
ttacatgcacgatctc

SEQ ID NO: 1894 - DNA, 16 bp, synthetic construct
  misc_feature 1..16: note = Synthetic oligonucleotide
  source 1..16: mol_type = other DNA
aattttatggaacctc

SEQ ID NO: 1895 - DNA, 16 bp, synthetic construct
  misc_feature 1..16: note = Synthetic oligonucleotide
  source 1..16: mol_type = other DNA
tcatagatactcctca

SEQ ID NO: 1896 - DNA, 16 bp, synthetic construct
  misc_feature 1..16: note = Synthetic oligonucleotide
  source 1..16: mol_type = other DNA
ccctaacactcagttc

SEQ ID NO: 1897 - DNA, 16 bp, synthetic construct
  misc_feature 1..16: note = Synthetic oligonucleotide
  source 1..16: mol_type = other DNA
tccgtcaatatattct

SEQ ID NO: 1898 - DNA, 16 bp, synthetic construct
  misc_feature 1..16: note = Synthetic oligonucleotide
  source 1..16: mol_type = other DNA
ggtaagagcgatggga

SEQ ID NO: 1899 - DNA, 16 bp, synthetic construct
  misc_feature 1..16: note = Synthetic oligonucleotide
  source 1..16: mol_type = other DNA
gagtattgtttttgtg

SEQ ID NO: 1900 - DNA, 16 bp, synthetic construct
  misc_feature 1..16: note = Synthetic oligonucleotide
  source 1..16: mol_type = other DNA
gttatatttgatcctc

SEQ ID NO: 1901 - DNA, 16 bp, synthetic construct
  misc_feature 1..16: note = Synthetic oligonucleotide
  source 1..16: mol_type = other DNA
ctaattttctgactgt

SEQ ID NO: 1902 - DNA, 16 bp, synthetic construct
  misc_feature 1..16: note = Synthetic oligonucleotide
  source 1..16: mol_type = other DNA
attcagaatttccact

SEQ ID NO: 1903 - DNA, 16 bp, synthetic construct
  misc_feature 1..16: note = Synthetic oligonucleotide
  source 1..16: mol_type = other DNA
gcaatgctgacttggc

SEQ ID NO: 1904 - DNA, 16 bp, synthetic construct
  misc_feature 1..16: note = Synthetic oligonucleotide
  source 1..16: mol_type = other DNA
tatttcttgatgtggt

SEQ ID NO: 1905 - DNA, 16 bp, synthetic construct
  misc_feature 1..16: note = Synthetic oligonucleotide
  source 1..16: mol_type = other DNA
acgcaatgctgacttg

SEQ ID NO: 1906 - DNA, 16 bp, synthetic construct
  misc_feature 1..16: note = Synthetic oligonucleotide
  source 1..16: mol_type = other DNA
cgtgttatatttgatc

SEQ ID NO: 1907 - DNA, 16 bp, synthetic construct
  misc_feature 1..16: note = Synthetic oligonucleotide
  source 1..16: mol_type = other DNA
caacacatcattgggt

SEQ ID NO: 1908 - DNA, 16 bp, synthetic construct
  misc_feature 1..16: note = Synthetic oligonucleotide
  source 1..16: mol_type = other DNA
cactttataccagtgt

SEQ ID NO: 1909 - DNA, 16 bp, synthetic construct
  misc_feature 1..16: note = Synthetic oligonucleotide
  source 1..16: mol_type = other DNA
ttatatttgatcctca

SEQ ID NO: 1910 - DNA, 16 bp, synthetic construct
  misc_feature 1..16: note = Synthetic oligonucleotide
  source 1..16: mol_type = other DNA
ttatgaaattattggt

SEQ ID NO: 1911 - DNA, 16 bp, synthetic construct
  misc_feature 1..16: note = Synthetic oligonucleotide
  source 1..16: mol_type = other DNA
aagtattgccagctaa

SEQ ID NO: 1912 - DNA, 16 bp, synthetic construct
  misc_feature 1..16: note = Synthetic oligonucleotide
  source 1..16: mol_type = other DNA
atgctaattttctgac

SEQ ID NO: 1913 - DNA, 16 bp, synthetic construct
  misc_feature 1..16: note = Synthetic oligonucleotide
  source 1..16: mol_type = other DNA
ggcattcagaatttcc

SEQ ID NO: 1914 - DNA, 16 bp, synthetic construct
  misc_feature 1..16: note = Synthetic oligonucleotide
  source 1..16: mol_type = other DNA
tttataccagtgtctt

SEQ ID NO: 1915 - DNA, 16 bp, synthetic construct
  misc_feature 1..16: note = Synthetic oligonucleotide
  source 1..16: mol_type = other DNA
tattctcatggtacag

SEQ ID NO: 1916 - DNA, 16 bp, synthetic construct
  misc_feature 1..16: note = Synthetic oligonucleotide
  source 1..16: mol_type = other DNA
tgagtattgtttttgt

SEQ ID NO: 1917 - DNA, 16 bp, synthetic construct
  misc_feature 1..16: note = Synthetic oligonucleotide
  source 1..16: mol_type = other DNA
agttttgtaagtgcaa

SEQ ID NO: 1918 - DNA, 16 bp, synthetic construct
  misc_feature 1..16: note = Synthetic oligonucleotide
  source 1..16: mol_type = other DNA
taagtattgccagcta

SEQ ID NO: 1919 - DNA, 16 bp, synthetic construct
  misc_feature 1..16: note = Synthetic oligonucleotide
  source 1..16: mol_type = other DNA
aacgcaatgctgactt

SEQ ID NO: 1920 - DNA, 16 bp, synthetic construct
  misc_feature 1..16: note = Synthetic oligonucleotide
  source 1..16: mol_type = other DNA
agctttaaactcaggt

SEQ ID NO: 1921 - DNA, 16 bp, synthetic construct
  misc_feature 1..16: note = Synthetic oligonucleotide
  source 1..16: mol_type = other DNA
gtattgtttttgtggg

SEQ ID NO: 1922 - DNA, 16 bp, synthetic construct
  misc_feature 1..16: note = Synthetic oligonucleotide
  source 1..16: mol_type = other DNA
agtattgtttttgtgg

SEQ ID NO: 1923 - DNA, 16 bp, synthetic construct
  misc_feature 1..16: note = Synthetic oligonucleotide
  source 1..16: mol_type = other DNA
aattatggaattgcag

SEQ ID NO: 1924 - DNA, 16 bp, synthetic construct
  misc_feature 1..16: note = Synthetic oligonucleotide
  source 1..16: mol_type = other DNA
cgcaatgctgacttgg

SEQ ID NO: 1925 - DNA, 16 bp, synthetic construct
  misc_feature 1..16: note = Synthetic oligonucleotide
  source 1..16: mol_type = other DNA
cgtcaatatattcttt

SEQ ID NO: 1926 - DNA, 16 bp, synthetic construct
  misc_feature 1..16: note = Synthetic oligonucleotide
  source 1..16: mol_type = other DNA
tgtatttcttgatgtg

SEQ ID NO: 1927 - DNA, 16 bp, synthetic construct
  misc_feature 1..16: note = Synthetic oligonucleotide
  source 1..16: mol_type = other DNA
ttattctcatggtaca

SEQ ID NO: 1928 - DNA, 16 bp, synthetic construct
  misc_feature 1..16: note = Synthetic oligonucleotide
  source 1..16: mol_type = other DNA
gtgagtattgtttttg

SEQ ID NO: 1929 - DNA, 16 bp, synthetic construct
  misc_feature 1..16: note = Synthetic oligonucleotide
  source 1..16: mol_type = other DNA
tgggaattatggaatt

SEQ ID NO: 1930 - DNA, 16 bp, synthetic construct
  misc_feature 1..16: note = Synthetic oligonucleotide
  source 1..16: mol_type = other DNA
ggttatgaaattattg

SEQ ID NO: 1931 - DNA, 16 bp, synthetic construct
  misc_feature 1..16: note = Synthetic oligonucleotide
  source 1..16: mol_type = other DNA
tgaagattggctctgg

SEQ ID NO: 1932 - DNA, 16 bp, synthetic construct
  misc_feature 1..16: note = Synthetic oligonucleotide
  source 1..16: mol_type = other DNA
tatatttgatcctcaa

SEQ ID NO: 1933 - DNA, 16 bp, synthetic construct
  misc_feature 1..16: note = Synthetic oligonucleotide
  source 1..16: mol_type = other DNA
gtaagtattgccagct

SEQ ID NO: 1934 - DNA, 16 bp, synthetic construct
  misc_feature 1..16: note = Synthetic oligonucleotide
  source 1..16: mol_type = other DNA
gtgttatatttgatcc

SEQ ID NO: 1935 - DNA, 16 bp, synthetic construct
  misc_feature 1..16: note = Synthetic oligonucleotide
  source 1..16: mol_type = other DNA
gggttatgaaattatt

SEQ ID NO: 1936 - DNA, 16 bp, synthetic construct
  misc_feature 1..16: note = Synthetic oligonucleotide
  source 1..16: mol_type = other DNA
ccgtcaatatattctt

SEQ ID NO: 1937 - DNA, 16 bp, synthetic construct
  misc_feature 1..16: note = Synthetic oligonucleotide
  source 1..16: mol_type = other DNA
gcattcagaatttcca

SEQ ID NO: 1938 - DNA, 16 bp, synthetic construct
  misc_feature 1..16: note = Synthetic oligonucleotide
  source 1..16: mol_type = other DNA
ttataccagtgtcttc

SEQ ID NO: 1939 - DNA, 16 bp, synthetic construct
  misc_feature 1..16: note = Synthetic oligonucleotide
  source 1..16: mol_type = other DNA
ctgaagattggctctg

SEQ ID NO: 1940 - DNA, 16 bp, synthetic construct
  misc_feature 1..16: note = Synthetic oligonucleotide
  source 1..16: mol_type = other DNA
gtgtatttcttgatgt

SEQ ID NO: 1941 - DNA, 16 bp, synthetic construct
  misc_feature 1..16: note = Synthetic oligonucleotide
  source 1..16: mol_type = other DNA
actttataccagtgtc

SEQ ID NO: 1942 - DNA, 21 bp, synthetic construct
  misc_feature 1..21: note = Primer
  source 1..21: mol_type = other DNA
ggcagccttgtactcttggaa

SEQ ID NO: 1943 - DNA, 20 bp, synthetic construct
  misc_feature 1..20: note = Primer
  source 1..20: mol_type = other DNA
gctggtaatcccggtcaaag

SEQ ID NO: 1944 - DNA, 26 bp, synthetic construct
  misc_feature 1..26: note = Probe
  source 1..26: mol_type = other DNA
ctgggatggagttgggaatcacagcc

SEQ ID NO: 1945 - DNA, 22 bp, synthetic construct
  misc_feature 1..22: note = Primer
  source 1..22: mol_type = other DNA
ctcctgctgagtgaccataaag

SEQ ID NO: 1946 - DNA, 20 bp, synthetic construct
  misc_feature 1..20: note = Primer
  source 1..20: mol_type = other DNA
ggacttcttcgagccagttt

SEQ ID NO: 1947 - DNA, 24 bp, synthetic construct
  misc_feature 1..24: note = Probe
  source 1..24: mol_type = other DNA
agagtggtggctactgctgaactg

SEQ ID NO: 1948 - DNA, 16 bp, synthetic construct
  misc_feature 1..16: note = Synthetic oligonucleotide
  source 1..16: mol_type = other DNA
ggctactacgccgtca

SEQ ID NO: 1949 - DNA, 14654 bp, Macaca fascicularis
  source 1..14654: mol_type = other DNA
catgccagcagggaaggggagctggcatgtcaatggtaagcatgggaacaagaggagggaggcagagctctcacactcttttaaacaatcagatgttgcatgaattgagtcaaaactcactcagctccaaggggatgacgctcagccattcatgaggaatctgcccccatgatccaatacctcccactaggcccccttccaatgctgaaggtcacatttcctcatgaagtttgaaggggacacatattcaaatcatatcattcaacacaacccccccatcacatgttcttctcacattgcaaaacacagtcatcccttcccaggggtctcccaaagtcataatttgttccaacctcaagtccaaagttctaaatcacattcaaagacccctccttccagctaggggcctgtaaaatcaaaacaagttactccaggataaaatggtggcatagacattgcataaacactcccattccaaaagaaagaagtcggccaaaagaaagaggcaacatgcccccatgcaagtcccaaacccagcagggcagacgtgaaactttaactctccagaacaatctttgaatccatgtcccatacctagggcacgctggcacaagtgttggtcccccgaggctttgagcagctctgcccctgtggcttttcagggggcagctgctgtggctgctgctacagatggattacagttgagtgcatgtggcctttccaggctcaggatggaagctactcgtggctctaaaattacgggatctggagggtgactgccctcttcccacagcctcactaggtagtgccctggtggggactctgtgtaggcgctcctaccctacctttcccctcagcactgtcctagtagattatctctgtggggaatttgtcctgctgcaggcttctacctgggcacccaggcttttccacaaaccctctgaaatctagatagaagctaccaagtctccttcactcttgaattctgcacacctgaagacctaaaccatatacggaagctgccaaggtggcttgcaccctctggggcggtgtcccaagccacctttaaactgagggtgtaactggagcaaccagtaggtgaggagcagggtcctgaggctgagaaggggaccaacatcccaaagctgggcccttaaatcatttttcctctctgagttgttggatgaaagcaacttcctctcctcttgcttcggtttcctcatcagcaaaatcagatcataatcctggcccattgaggggatgattataaaactcaatcaaatggagaagtatttgcaaatggaatgtattgcaacgtgtattgtgcagtccctgtgtaatcacctttttgttcctgcctcacaagctgggttatgtgtgtaggggtggggggaggtggccacgatgcccccagagatgtttgctgaggatgaaataggcttccatgaaagggtcagtttggcttctgtggttcagctgtctttgaggcccttctgcctggggcaaagcacaaaagtccaacagcaatctggttgcctgacttcttagccatggaagtgtggtgagcagtggtctctagtccctccacccagtgtgcctcgggagtggaacatggggcggtggcctctgctggggaggatgctgggggttctctgaaaggaggcaatgcctgattttgtcattgaaggatgagcatgatttttccagatggtggaagcaggtgcttctggcagaagaccccacataagcaaatgtgtaaaatccacaaggcatggccttcaacaagagcaggtctggggcggtggctcatgtcaaggtgggaggctcacttgaggccaggagttcaagagtagcccagtcaatatagtgagatcccatctctaacatattttttcaaaaaattagctgggtggctggatcatgcctgtagaaccagctactcaggaggctgaggtgggaggatggcttgagcccaggagtttgaagctgtagttcgctgtgattgtggcactgcacttcagccttggctacagagtgagaccctgtctccaaaacataaacaaaataaccccaacagcattacaataaatatacaataagcatccacacggcatgtgtgggagactgtgcttatgctgatggcatgggcaggaggaaggcaggcatctggggagtgtgggtgcacgggaggacagggagggtcccacaggctgtcagtggcaggtctttcttcctgaagaccactgcagacccccaaccctgaggatgcgaggcaggtgggttggatgagagggacctgggtgtttcgtctgcggctgctcctctaagtacaacagcaaagagggtgggcctggactgaaggtggtgctggggagcagcctgtttgctgtgcttgatcacgagttgctgggaagttgtgacattcaccttccctttccaatttcatagttatctgggaggccagaggacgtgtctggttattacacaggtgcacagctggagatgggatccacaaagctcggaacagctggatcttgctcagtctctgtcaggggaagattcctcggtaagtcggggaccgttgacctgcccccatctccttattctcaacaatagctccatgaaggaaggatcattccgcttttgtagataagttcagagacgttagtaactggttcagatcagacaggaaagcagtagcagagtcgggatttgcacccaggcttgagtctgatgctccctccctcctgctgtgcccttaaacagtagagagaggccgggaaacaggtcagatgggttcacaaagctccctgggctcagctctggtttagactgtggagacacagctgggggaccccagaaggaaggtctgtgttgggggtgcctgactctttaggaaatttgaaggaaccaaagaaggtggaggtggggaggtgacccggactctggtctgtccttatggcctggaaacacccaggctggccccagggtgctgctgctgaggcccaatgggaacgacaaatttattttgagatacaaggaacctagaggtcatctcaccacccccccctccaagtctgagcaccaacttgtgccaggccctgtggggaaactgaggccctgggaggggagtgacttgcccagggtcctgtgtctggaggctgagcaggtagctcgtaggactccacgtctctggccctcacctctgtccctctcttcagacctctggggggatggagaagaaacaggctgtgctgtgtccctaatgggaaacgtggctgagacaggggagtgagaagggcgtgctgtggaatagtgtctgtggcatgatgccagctttgcaatcaagagattcaagaaccacactgtggaattgtggatataactacaggagtgacagcttagatctctgtgtttgtagaagcagaatcaaacctggaaactcttggattatcaaaattatacatttttgcttctatatcagagtcataaggccagatgttggcctcccctctgccctccaagagctgtgtgactctgggcaagtcacctccgctctcagcctgagtattctcccctctcaaaaacctgatagagctgccaaaagtacatgaaatcggggggaaatttctgtgaaatctgagtcatggtcttctttttcttcactaagaagagatgcccgtcaagatagaaagcactatggctgtggcttgtaaccccagtgctgtgggaggtagaggcgggaggatcactagaggctgggagttcaagacagcctggaaaacacaggagatgctgtctctatgaaattaaaaatgaacaaattagcccagcatggtggcgtgcacctgtagtcccagctactcagagggttgaaggaggaggatctcttgagcccagtagatctaggctgcaatgagctaggatggcgccaaagcactccagcctgggtgacagagcaaaaccgtttctcaaaaatgaaatgaaaatggtgatttctcaggaggaccacactgtgtcgaccctctattcctgcccaaggaggaggccccgcagtgacatggagggtgctgctttgctgagactctttgtcctctgcatctggtgagcttggctcagagtgctgaggtgggagggaggtccccggtctgggctgcacagttgggcagggcttgggctgggcctgggccatctgggtttctttcaggaaccaaagtcccttcccagaattgaccaaccagcagactcgcccagggagaacctgctgtatcctagtcaaggctaacgggcaatatccagcctcaattctcagcagaggccccagatcagggtctgagccaggccaacaatgaccaaagaggatgggatcctgggtgcagctcctcacaagtgtcgggcgagtctgaggcctcagctctctctgccctcctgctcctctgctctctcctggtcctcctgtgtcctcatggatcatgagatggctgtcctggcccagggggtcatacagtgagcaaagcaggaacaaggggaagggaaccccctctcctgtcacccctgtcccttatagcaagaagcacccagacacccctctgcatactgccctggtgaactgctgcccaggactgggtcccccttctacccttgctgcgtggggtcccagaagacagacatctgtgtgtctgaaccctgggataaaggcaggaaggggaaagagggaggcgagtggcttttgagagggggcttttgtatgagagctggaggatggaaccccatcagggggcccggaaaccactgagctgttaaaataaaggctgcaaacaaagaccagctgctggaagtgggtgtgccagggagggagcagagacacacggtgagaaaagagaaatggtaatgcctggagccgcccctgactgcgatgggcctgaagccgtattattagtagtaattatagtatcattattagtcattttcatcttatttgtatcctccgtctatctctcctctccaccttttcctaacattctatcaccagttttatgtcttccattagcaactttgtagctgtaaacagtttacttacaactttctcatgccctcagtagtacccagtatttcttgacttctctctttaaaaaatgacgatattaatcttccttctccttccttcagtgtttcacatcccaactgctacctttgtgctttaaattttgtactaattggtattagtaacaagtatatttagttctcacatttacatgttgtgtatatggttttttgtcctaaagaagagactactgagaaccagtgagactgagagaatgggcatcttcacgtactgctagtttgagtgtgaatttggtacaatgtgcatacagtgtggctgtaggtataaaacctaattctactcctacgaatatcttaaggaaataatctcaaatgtgagcaaagttttaggagaaggaggatgttctttgtagcataaattacatgaagaattagaaataccctaaggtccatcagccagagaggacagcagaggggacagggcagcaccaggagggctcggcagccacagcaggggctgcgccggcatctggcaggatccaggtctttgtgggacagaggaccttagagaagcgacggggacacaggctgtccgctgcagcagcagtgaattcaccaagacgaagagttgagcacagagtgtgagacacggatttgcaatgaggagtcatttcccatgagcgtgtatacatgactcaatattgtatattgaagggagtagagcacagtcattgaagacatggggttgaagcagaagtcctggctctagcactattgtgaaaacacgggcaggttccctaacttttgtggattcctctgtgtttgaaagggaaggtggtacccatctcccgggctgtgtgtgatcatcgaatgagacacgtgtaaggagccctgcacatcacagacactcaatacacactggctatcatcaaccagttatcacacatgttcccaggcccaggtcattgtcagaaccttcctccccatctctattcctgtgtatggactctgtagttttctgtaatgatcaggtggctgcccctcctctgattatcttctcctcataccccaacaggacaagcggacttttccttgctgtgggagtgagggcagaggaagctgcagcgaggtgagtgtctgtaaatagcaggtgatggggactcagtgacagagaaacaatctgggttaggttggtcttgacatttgctgccaccctagaaggatgtgcagagccccggctgctcaagcctccctctgtccacaggtggctcacattcaatcccacaatttgttttctcctcctcaagggtgcagcaaaaccatccaggtgggacagatacaggagatcctcaaggtaagcccctcagtgaccgggctgctggcaccatggacccaggtaggctcgcctcctcttccctggctggttcccactcgcacctagcacggagggtggtgcctccacagctgagtgaaccccagaggaacccagatggacaaggaggccaatgagtctgctccaagccccaagagaagccgcatagagtcccccgacccaggggtctgtggggccatctgcatcctgacttctcctcagggggggcacggcccaggagcccacttcctctctaccctggcactagcaaatgtctcaagtggggcaggagggccttggggaaatggaaccagcaggggaggggagtggggggagagcagggtccaggaggggagggctgggagagcaggttgaccagcagccccgacctgtcacctcccgctctgctcccagctgaccctgggtgtttctagccgaggctggtcccctccctccagctcttgccctgcaccagcccctctgctctgagtggccttgtgggaatgtatcaggcctgatccagcttccaacttaactggaccccggtctggcctttgccacgtcccctctgtgtgacctggcgcgccttacctcccctctcctgtaccatgagaataatatttccccatgttgtcttgaggatcaaatatgacacagctatctggcctggccggtgcctgccacacggtagggcctccctaagggctggttcccatcccctctacctgtcccctgttgattccaggtggaaggcacccagtcctcccagctgtgttaggggcacccgccctgccctgcccaccacaagcgcctgctgaccagggatgactgccccgggcaggggttgagtccagtcatctaaaatacccctggtcaaagaaaaatctgaggcccagtagaattttaaagagtttatttgagtaagaaagaattcttgaattgggaaacagcaaactggaggaggcttcgtgctatggtgaaaaagtgtgggagacaatgtttagcgggtgaatatgaaactgcaataaggacatgacttgattggttgcacttacaaaacttcctgttttggtttactttgttggaaaatccctggtcacattggtgttggtgagtttagggaggtctccgaatgcaggtgagaccggaccttagccttgcccaggtttttgacatccaagagagaaaaaggttaagtccaagcaaaagcaaaagcaaaagcaaaagcaaatcagcttttattgcaaagcggacgctcaggctcgggggtgggagtgcaggcggactcagaagagccagtcgggcccagtgtggtttggggtttctgcctttgctggtttattaaattaaggggtggagtaagcatgaagatttctgggaagaggtggggatttcttggaacttggcggggaggggtgggtaccacacagttttgtaccaaacacaggcatacatggaactgctgtggcgcgggtgggggtggggtttagtgagacaaggagggtatgattgagtgtgaggcgaatcgtgagtccgacccagcactgagttggatcttactggtcttcgccggattggccacttcctgtttgtcagggtcctgtaggcctgtcgcctccccctgtccctgcagctggtttcagcagctccttctgtgtctgtcatgggaaccagctgcctggagttcttgtttcttctatgacctcccagtattcccatctcagcatggcccgctgtcagctggctgctcgtgactggccgaggttaagttttgtttgtgtctaacagaagcgcccatctgatgtgaccccagttcagtttcccacagcttgcagtttaaggggggtgacagccgttctcaaggcctcgtaggtattgtttgcccaggaatgtttcagagctggattttgttttaattttgcttttatatccaccagccccaccccaccaagaaatatacagatttagtgctggaggttccttccatccaaccctgggtttccttcttccttttggtgaagaaggaaaaagaaaaaaccagacaagtcctcgcccagccgagtcagcactgcgttcatttccctaagccccatttccttaggatggcttcctcccctcactgagttgcagtggcaaccaagtcagctctgctcaggagccgccctgtacagcaaactgggctgtgctgaatcctgtccaagaccaggggagggcagggaagattagaagccaggagctcctaggccaccccggattcctgggctgggctgggctagggggccaaggaagaaactgtccctcccaaacaggatgatctgtggtttaataccaaatcacaggcatttttaaaacacaaggagtcttcgaagcaatgtcaaggaaacgttggccttggagtcaaatcctgagcttcctgcttgctggttttgggcggtgactctcgctgtctggattttactttcttcttctgtgaattaagaatgaggccccttgtgtgtccacagcaggaaacaattttacatcatgtctcggtgcacacacaaatacatactggtccccagtccattatctgtaattccataatttccagatccctgcaaaccacacattttgggggcagctgacttcaggagtaatcctgctctgtactgactcgagttctttgtaggcctaccattatttaccccatttaatgtgaatatttgcttgtttcactgttgaaacatgtgtgggtttgattacggggagcagtctagcctctgctgggaatggtcaggaatataccatatgcaccccgtgtcctttctaaaatagtgaaaattcggaatgcctaaacacatctggattccaggaatttacattaagggatatatatttgaaataactcacaaaaaacaatactcatccctgctgtgattgctatattctgatattttcaaatcgattttcttttcaaaatgctgctcttgaaccaataaactaatttcataacccaatgatgtgttgaaactcacattttgaagacacaggtataaagtgtttgacacccaacaggcacgtggcagatagaagtgatcactgggatgtttcctcttccttggcctggaaggctcactttgtgttggttctgagctgaaaaggattcattcctccccaaagcactgtggcactcccctggtgtttcaatattctcaggctgccatggtaaaatatcacaggctgggtgacttcaacatctggtttttcttttctcacacttccagaggcaagaagtccaaggcgaaggtgccggcagggttggagtctggggaggactctcttgctggcttgtggaggctgcctttgtgctgtgtgatcacgtggcttgcttgtgtctctttcacttcctacaataggacactagccctctaacaggattagagtcctacccttgcgatctcattcagtcttttttttttttttttttttgagacggagtctcgctctgtcacccaggctggagtgcagtggccggatctcagctcactgcaagctccgcctcctgggttcacgccattctcctgcctcagcctcccgagtagctgggactacaggcgcctgtcacctcgcccggctaagtttttgtatttttagtagagacggggtttcactgtgttagccaggatggtctcgatctcctgacctcgtgatccgcccgtctcggcctcccaaagtgctgggattacaggcttgagccaccgcgcccagccctcattcagtcttaattgcttccttaaaggcctgatctccaaatatagtcacctgactttagggcttcagcatatgaattttgggggcatacaattcccttgatagcactgatgactccatcaaacgtatcccacaccacagctgtcctggaaaattaacacgtaaccatcttttacgcaatggctgttatctcctctacactttcctccaacctgatccttttttctttccaactagagagcaacatttctcttgaggattaccttaattatttccagaaaaacgtgagcccacaggagctgctactcctgctgagtgaccataaagcctgggagagagtggtggctactgctgaactgcccaggtaacctccatggggttatctccattgggaaccctggtgatgccacccagatctcccttgggctagttttccctgacagacacacctcctccaggcaggcccctctgctgggcttgaggatgaccttctcggcagtccaggaggaacatttcctcccaatccttcgctggcagtgagtagcctcaggctgaggggacaggaagcccacagggacagggtcatttctgccatctgctggtgatgggaaatttgcgagttactttcccactttcagcctttcttcatccatggagttttattgtgagaaaaatgagatcatgcatgtaaagtactcagcataatgactgacacatagtaggtgcacagttaacgttaacatcttacaaggttggtggaaatagaccagggtcaagggtcttcctcttgaagtccagcagcacttcctttgggacaagtccgaaaaatcctgacttaattgatgtgtgttcctggggatgctggctggggccttttttctcatctgaggaattccataaacacggcaggacccttctgctggtccaggatgctgagaggctggagtggacttggacagcgatgggtctctttccggctctgtctgtgcccagtccctgggctctaggcttatgtcatggagactgggaactgtcatctgtccaatagaaatagcaagtcaatgtcataggagtatggtgaaggccttagagtgaactccaggtcaaaggtggggaaccaagaccaagatcctggccaaaggccaagagagaccaagaccagtgtcaaagcctggggtcaggatggagcaagagtcagccttggttgtaggacaagtaggaaggttgaggcaccagggctgggactagggtgtggcaagagaggcaccaagggcttgaaacttaaggaggtcatgaacttgcagaggacatgtgagtgggagaggaatatttcttctctgtctgggagaggaatatttcttctctgtctggatgatcccaacactcatggacatagagggtcatggttgcctgtgtctctcacaccctgcctgggaactggcaagttctgggctaccctttgggaccttcttctcttctacacaaagaagcccctgacaatggcaagcagtatgccttagtgaccatctccatagtagaatgagttgctgtcaatgtatataatttcaggggtactgagcagactcacaagtccccaaccaagaaggaaaacacttcctctaccatcttgtccaaattcaggtcttttcagcgttagcaatttatatagatggttctgaaagtgtcccgagtcttctagaggttccataaaattgcacacggccttggcgtacacacaggtgaagctgtcactgctaaggcatcagttaggctggtgacatctgcgagtgagacctggaaggttgggggtgcagggggcaggtcaggaggcggtaaggtggctggagagtccatgtggagccagaatgaatacccagatctcccactccggtcaactggggcagtgcccggacccagtagccttcagccagaaagtgaaagggcatgaggccttggaagggagcacatgccaggcaaagtgagctcctgtctctctgaggtttggtttcgtttgaattcaaagtactcagaggtagccagacggcaatgtctgagggcaccttacctttgacgccacctgaacattaatggggattcctaaaatcatctttagattttataattcactagaaggattcatataactcactaaaaactgctatttcacgatcgtggtttatcacacagaaagaacacagattaaaatcagcctaaggaagagacacacagggcagagtctgggagggcttcaggtgtgaagcttcattgtcctcaggacgctgtgatctcctgtgccaatgtgggacaagacacatggggtgctgccaaccagggaagctcacccagttaaggaaacattcctgtgaatcacaagaaatcaggaaggaagcctttattcaggatggttgttacaggggagggagaccgagtccagctccaaacacagtaaagacagagagggagtcacagccaacaccagggtgaggggcggcagatggaacaggactaacaggagacaccagagtgggatgttcctgccaaactgtcctaacaggattctcgctaaaggcaggtcagacactcacccatcaacggtgggagtgaggagcatgatcagatagcaaagagtgctcagacagcaagcagggaggaccctccctaaaccgacttggggagattcttgctgagctgggcagtgcaagtccagcaagcagtgggtgggtgtggaaggccaaggtcggcgcctagtggagaagaagctctgaagcgccccgctggagctggtcaagcagaaagtctttctcaacccatgtcttagtgtccagaatatttgctggggttggatcacaagctgccctcatgactgacctgtagtctccagcccctccctgaggtctcacacctttagtccccaggtcctctggaagtcaggaaagacaccaaatagccccaaaccccatcatccatcacattgctgtactgtcccgtggccaaatcaccagacaaagaaagatgttcctaccaggcaggacactccaggagcctggagatcacttcccaggagctgaggacaaagggaaggcctctctttgggaaaagttcatgcttcactttgctaccatcctgggaataaggtgtctttgtcccactctcacggctctttgttcatctgcagagttttcccctctccaaacactttggcaatcacagtgttggcctgcccttgagtgaggaggcatctttatcaaacacctaccacgaaagagcatctgagatgcctttaagatatttatttccatatggaataagtactgaggggtatctatgatgaacaaagcatgtttgagcttaaattctcttcatttgtaaaatttgtttctatttgattgatagtgagagctctgcaatttacacaggatagagatcgcatggagccgatttcacagacagggaaactgcatttcttaatcctttaaactttccttgtgcagggatgaggcagatgagctctataaagctctgaacaagcttataagacacatggtcatgaaagacaaaaactggctcgaagaagtccagcagcacagaaagcggtttttggaagagtttcctcagttggaaagggagcttcaggataaaataagaaggctctgcgaccttgcaggtgaggttcagaaggtccacaaaggcgccaccatcgccaatgcgttctccagcactctcggcgttgcctctggtgtcctgaccttcctcggcatgggtctggcacccttcacagcggggagcagccttgtgctcttggaacctgtgacggggttgggaatcgcagccaccttgaccgggattaccagcggtagcgtggaatacgcaaagaagcggtcggcacaagccgaagcccatgaactggtcaacaaaagccttgacaccgtggaggagatgaacgagtttctgtatcacaacatacccaactttatttccttacgtgtcaatcttgtcaaattcacagaagacactgggaaggccatccgtgccatcaggcaagccagagccaaccctcactcagtaccacatgtcccagcctcactccaccgggtcactgagccagtctcagctacaagctttgaagagatggagagatggagagagttggagagatggagagagttgctgaatcccgcaccacgggggtgatcagaggagccaagatcgttgataaggtctttgaaggcgcccttttcgtgctggacgtagtcagcctcgtgtgccagttaaagcacttacatgagggggcaaagtcaaagacagctgaggagctgaagaaggtggctcaggagctggagaagaagctaaacattctcaacaagaagtatgagactctgcgccaagaaccgtgaccacagggcagggcaaccaccaggggagatatgcctgggacgggccaagacaaaatgcaaactttttttttttt

1-37. (canceled)

38. A method of treating, preventing, or ameliorating a disease associated with APOL1 in an individual comprising administering to the individual a compound according to the following formula (SEQ ID NO: 1164): [chemical structure]
or a pharmaceutically acceptable salt thereof, thereby treating, preventing, or ameliorating the disease.

39-40. (canceled)

41. The method of claim 38, wherein the disease is one of focal segmental glomerulosclerosis (FSGS), collapsing nephropathy, CKD, hypertension attributed nephropathy, HIV-associated nephropathy, sickle cell nephropathy, arterionephro-sclerosis, lupus nephritis, ESKD, and other forms of APOL1-associated proteinuric disease.

42. The method of claim 41, wherein administering the compound inhibits or reduces or improves any one of edema, proteinuria, albuminuria, GFR decline, high lipid levels, high cholesterol levels, nephrotic syndrome, high blood pressure or hypertension, kidney damage, glomerular damage, and kidney failure.

43-45. (canceled)

46. A method of reducing or inhibiting any one of edema, proteinuria, albuminuria, GFR decline, high lipid levels, high cholesterol levels, nephrotic syndrome, high blood pressure or hypertension, kidney damage, glomerular damage, and kidney failure in an individual having, or at risk of having, a disease associated with APOL1 comprising administering a compound targeted to APOL1 to the individual, thereby reducing or inhibiting any one of edema, proteinuria, albuminuria, GFR decline, high lipid levels, high cholesterol levels, nephrotic syndrome, high blood pressure or hypertension, kidney damage, glomerular damage, and kidney failure in the individual, wherein the compound targeted to APOL1 is the following formula (SEQ ID NO: 1164): [chemical structure]
or a pharmaceutically acceptable salt thereof.

47. The method of claim 46, wherein the individual has, or is at risk of having, one of focal segmental glomerulosclerosis (FSGS), collapsing nephropathy, CKD, hypertension attributed nephropathy, HIV-associated nephropathy, sickle cell nephropathy, arterionephro-sclerosis, lupus nephritis, ESKD, and other forms of APOL1-associated proteinuric disease.

48-49. (canceled)

50. The method of claim 38, wherein the compound is administered parenterally.

51-62. (canceled)

63. The method of claim 46, wherein the compound is administered parenterally.

64. The method of claim 38, wherein the pharmaceutically acceptable salt is a potassium or sodium salt.

65. The method of claim 46, wherein the pharmaceutically acceptable salt is a potassium or sodium salt.

66. The method of claim 41, wherein the disease is focal segmental glomerulosclerosis (FSGS).

67. The method of claim 38, wherein the compound is the following formula (SEQ ID NO: 1164):

[chemical structure]

68. The method of claim 46, wherein the compound is the following formula (SEQ ID NO: 1164): [chemical structure]
